(19) United States
(12) Patent Application Publication
(10) Pub. No.: US 2022/0348917 A1
(43) Pub. Date: Nov. 3, 2022

(54) LIPOSOMAL SPHERICAL NUCLEIC ACID (SNA) CONSTRUCTS FOR SPLICE MODULATION

(71) Applicant: Exicure Operating Company, Chicago, IL (US)

(72) Inventor: Samantha M. Sarett, Cambridge, MA (US)

(73) Assignee: Exicure Operating Company, Chicago, IL (US)

(21) Appl. No.: 17/639,938

(22) PCT Filed: Sep. 3, 2020
(86) PCT No.: PCT/US2020/049254

§ 371 Date: Mar. 3, 2022

Related U.S. Application Data
(60) Provisional application No. 62/895,937, filed on Sep. 4, 2019.

(51) Int. Cl. C12N 15/113; A61K 31/712; A61K 47/54; A61K 47/69; A61K 9/127; A61P 25/00; A61P 35/00

(52) U.S. Cl. CPC C12N 15/113; A61K 31/712; A61K 47/543; A61K 47/6911; A61K 9/127; A61P 25/00; A61P 35/00; C12N 2310/11; C12N 2310/3233; C12N 2320/33

(57) ABSTRACT

Compositions related to spherical nucleic acids (SNAs) with antisense oligonucleotides and methods of treatment of diseases and disorders are disclosed therein. In particular, the antisense oligonucleotides are targeted to a region in a pre-mRNA of interest to regulate pre-mRNA splicing.

### RELATED APPLICATIONS

[0001] This application claims priority under 35 U.S.C. § 119(e) to U.S. Provisional Application Ser. No. 62/895,937, filed on Sep. 4, 2019, which is herein incorporated by reference in its entirety.

### BACKGROUND

[0002] The process of pre-mRNA splicing is a precise and complex process that involves removal of introns, which were first reported as interrupting the coding information of metazoan genes (Berget et al. PNAS (1977) 74:3171-5; Chow et al. Cell (1977) 12:1-8). Most human genes are able to express more than one mRNA variant by alternative splicing, a process that produces functionally diverse protein isoforms expressed according to different regulatory programs. Since the vast majority of human genes include introns and that most pre-mRNAs undergo alternative splicing, the disruption of normal splicing patterns can be the cause or modify human disease.

### SUMMARY

[0003] According to some aspects, spherical nucleic acids (SNAs) for regulating pre-mRNA splicing are contemplated herein. In some embodiments, the SNA comprises a core and an antisense oligonucleotide comprised of 8 to 50 linked nucleosides in length targeted to a region in a pre-mRNA of interest to regulate pre-mRNA splicing, and wherein the antisense oligonucleotide is attached to the core and forms an oligonucleotide shell.

[0004] In some embodiments, the pre-mRNA of interest is obtained from the genomic sequence of interleukin 17 receptor A (IL17RA), RE1 Silencing Transcription Factor (REST), IL1 receptor accessory protein (IL1RAP), or signal transducer and activator of transcription 3 (STAT3).

[0005] In some embodiments, the core is a solid core or a hollow core. In some embodiments, the core is a liposomal core.

[0006] In some embodiments, the core has a diameter of or about 5 nm to about 150 nm. In some embodiments, the core has a diameter of or about 5 nm, of or about 6 nm, of or about 7 nm, of or about 8 nm, of or about 9 nm, of or about 10 nm, of or about 11 nm, of or about 12 nm, of or about 13 nm, of or about 14 nm, of or about 15 nm, of or about 16 nm, of or about 17 nm, of or about 18 nm, of or about 19 nm, of or about 20 nm, of or about 21 nm, of or about 22 nm, of or about 23 nm, of or about 24 nm, of or about 25 nm, of or about 26 nm, of or about 27 nm, of or about 28 nm, of or about 29 nm, of or about 30 nm, of or about 31 nm, of or about 32 nm, of or about 33 nm, of or about 34 nm, of or about 35 nm, of or about 36 nm, of or about 37 nm, of or about 38 nm, of or about 39 nm, of or about 40 nm, of or about 41 nm, of or about 42 nm, of or about 43 nm, of or about 44 nm, of or about 45 nm, of or about 46 nm, of or about 47 nm, of or about 48 nm, of or about 49 nm, of or about 50 nm, of or about 55 nm, of or about 60 nm, of or about 65 nm, of or about 70 nm, of or about 75 nm, of or about 80 nm, of or about 85 nm, of or about 90 nm, of or about 95 nm, of or about 100 nm, of or about 110 nm, of or about 120 nm, of or about 130 nm, of or about 140 nm, of or about 150 nm, of or about 160 nm, of or about 170 nm, of or about 180 nm, of or about 190 nm, of or about 200 nm, of or about 210 nm, of or about 220 nm, of or about 230 nm, of or about 240 nm, of or about 250 nm, of or about 260 nm, of or about 270 nm, of or about 280 nm, of or about 290 nm, of or about 300 nm, of more than about 300 nm, of about 15 nm to about 100 nm, of about 20 nm to about 100 nm, of about 25 nm to about 100 nm, of about 15 nm to about 50 nm, of about 20 nm to about 50 nm, of about 10 nm to about 70 nm, of about 15 nm to about 70 nm, of about 20 nm to about 70 nm, of about 10 nm to about 30 nm, of about 15 nm to about 30 nm, of about 20 nm to about 30 nm, of about 10 nm to about 40 nm, of about 15 nm to about 40 nm, of about 20 nm to about 40 nm, of about 10 nm to about 80 nm, of about 15 nm to about 80 nm, or of about 20 nm to about 80 nm.

[0007] In some embodiments, the SNA has a diameter of or about 5 nm, of or about 6 nm, of or about 7 nm, of or about 8 nm, of or about 9 nm, of or about 10 nm, of or about 11 nm, of or about 12 nm, of or about 13 nm, of or about 14 nm, of or about 15 nm, of or about 16 nm, of or about 17 nm, of or about 18 nm, of or about 19 nm, of or about 20 nm, of or about 21 nm, of or about 22 nm, of or about 23 nm, of or about 24 nm, of or about 25 nm, of or about 26 nm, of or about 27 nm, of or about 28 nm, of or about 29 nm, of or about 30 nm, of or about 31 nm, of or about 32 nm, of or about 33 nm, of or about 34 nm, of or about 35 nm, of or about 36 nm, of or about 37 nm, of or about 38 nm, of or about 39 nm, of or about 40 nm, of or about 41 nm, of or about 42 nm, of or about 43 nm, of or about 44 nm, of or about 45 nm, of or about 46 nm, of or about 47 nm, of or about 48 nm, of or about 49 nm, of or about 50 nm, of or about 55 nm, of or about 60 nm, of or about 65 nm, of or about 70 nm, of or about 75 nm, of or about 80 nm, of or about 85 nm, of or about 90 nm, of or about 95 nm, of or about 100 nm, of or about 110 nm, of or about 120 nm, of or about 130 nm, of or about 140 nm, of or about 150 nm, of or about 160 nm, of or about 170 nm, of or about 180 nm, of or about 190 nm, of or about 200 nm, of or about 210 nm, of or about 220 nm, of or about 230 nm, of or about 240 nm, of or about 250 nm, of or about 260 nm, of or about 270 nm, of or about 280 nm, of or about 290 nm, of or about 300 nm, of more than about 300 nm, of about 15 nm to about 100 nm, of about 20 nm to about 100 nm, of about 25 nm to about 100 nm, of about 15 nm to about 50 nm, of about 20 nm to about 50 nm, of about 10 nm to about 70 nm, of about 15 nm to about 70 nm, of about 20 nm to about 70 nm, of about 10 nm to about 30 nm, of about 15 nm to about 30 nm, of about 20 nm to about 30 nm, of about 10 nm to about 40 nm, of about 15 nm to about 40 nm, of about 20 nm to about 40 nm, of about 10 nm to about 80 nm, of about 15 nm to about 80 nm, or of about 20 nm to about 80 nm.

[0008] In some embodiments, the region is a regulatory site or a site at which a splicing factor interacts.

[0009] In some embodiments, the liposomal core comprises a lipid bilayer and the antisense oligonucleotide is attached to the lipid bilayer.

[0010] In some embodiments, the antisense oligonucleotide is eight to 100 linked nucleosides in length, eight linked nucleosides in length, nine linked nucleosides in length, 10 linked nucleosides in length, 11 linked nucleosides in length, 12 linked nucleosides in length, 13 linked nucleosides in length, 14 linked nucleosides in length, 15 linked nucleosides in length, 16 linked nucleosides in length, 17 linked nucleosides in length, 18 linked nucleosides in length, 19 linked nucleosides in length, 20 linked nucleosides in length, 21 linked nucleosides in length, 22 linked nucleosides in length, 23 linked nucleosides in length, 24 linked nucleosides in length, 25 linked nucleosides in length, 26 linked nucleosides in length, 27 linked nucleosides in length, 28 linked nucleosides in length, 29 linked nucleosides in length, 30 linked nucleosides in length, 31 linked nucleosides in length, 32 linked nucleosides in length, 33 linked nucleosides in length, 34 linked nucleosides in length, 35 linked nucleosides in length, 36 linked nucleosides in length, 37 linked nucleosides in length, 38 linked nucleosides in length, 39 linked nucleosides in length, 40 linked nucleosides in length, 41 linked nucleosides in length, 42 linked nucleosides in length, 43 linked nucleosides in length, 44 linked nucleosides in length, 45 linked nucleosides in length, 46 linked nucleosides in length, 47 linked nucleosides in length, 49 linked nucleosides in length, 50 linked nucleosides in length, 52 linked nucleosides in length, 54 linked nucleosides in length, 56 linked nucleosides in length, 58 linked nucleosides in length, 60 linked nucleosides in length, 62 linked nucleosides in length, 64 linked nucleosides in length, 66 linked nucleosides in length, 68 linked nucleosides in length, 70 linked nucleosides in length, 72 linked nucleosides in length, 74 linked nucleosides in length, 76 linked nucleosides in length, 78 linked nucleosides in length, 80 linked nucleosides in length, 82 linked nucleosides in length, 84 linked nucleosides in length, 86 linked nucleosides in length, 88 linked nucleosides in length, 90 linked nucleosides in length, 92 linked nucleosides in length, 94 linked nucleosides in length, 96 linked nucleosides in length, 100 linked nucleosides in length, or any range or combination thereof.

[0011] In some embodiments, less than all of the internucleoside linkages in the antisense oligonucleotide are phosphodiester linkages. In some embodiments, all of the internucleoside linkages in the antisense oligonucleotide are phosphodiester linkages. In some embodiments, 1%, 2%, 3%, 4%, 5%, 6%, 7%, 8%, 9%, 10%, 11%, 12%, 13%, 14%, 15%, 16%, 17%, 18%, 19%, 20%, 25%, 30%, 35%, 40%, 45%, 50%, 55%, 60%, 65%, 70%, 75%, 80%, 85%, 90%, 95%, or 99% of the internucleoside linkages in the antisense oligonucleotide are phosphodiester linkages.

[0012] In some embodiments, the antisense oligonucleotide has phosphorothioate internucleoside linkages. In some embodiments, less than all of the internucleoside linkages in the antisense oligonucleotide are phosphorothioate linkages.

[0013] In some embodiments, all of the internucleoside linkages in the antisense oligonucleotide are phosphorothioate linkages. In some embodiments, 1%, 2%, 3%, 4%, 5%, 6%, 7%, 8%, 9%, 10%, 11%, 12%, 13%, 14%, 15%, 16%, 17%, 18%, 19%, 20%, 25%, 30%, 35%, 40%, 45%, 50%, 55%, 60%, 65%, 70%, 75%, 80%, 85%, 90%, 95%, or 99% of the internucleoside linkages in the antisense oligonucleotide are phosphorothioate linkages.

[0014] In some embodiments, the antisense oligonucleotide has 2′O (2-methoxyethyl) modifications. In some embodiments, less than all of the nucleotides in the antisense oligonucleotide include a 2′O (2-methoxyethyl) modification. In some embodiments, all of the nucleotides in the antisense oligonucleotide include a 2′O methyl modification. In some embodiments, 1%, 2%, 3%, 4%, 5%, 6%, 7%, 8%, 9%, 10%, 11%, 12%, 13%, 14%, 15%, 16%, 17%, 18%, 19%, 20%, 25%, 30%, 35%, 40%, 45%, 50%, 55%, 60%, 65%, 70%, 75%, 80%, 85%, 90%, 95%, or 99% of the nucleotides in the antisense oligonucleotide include a 2′O methyl modification.

[0015] In some embodiments, the antisense oligonucleotide has LNA modifications. In some embodiments, less than all of the nucleotides include a LNA modification. In some embodiments, the antisense oligonucleotide has morpholino modifications. In some embodiments, less than all of the nucleotides include a morpholino modification.

[0016] In some embodiments, the antisense oligonucleotide has 2′O methyl modifications. In some embodiments, less than all of the nucleotides include a 2′O methyl modification.

[0017] In some embodiments, the antisense oligonucleotide is comprised of 18 to 21 linked nucleosides in length.

[0018] In some embodiments, the antisense oligonucleotides of the oligonucleotide shell are directly attached to the lipid bilayer of the liposomal core. In some embodiments, the antisense oligonucleotides of the oligonucleotide shell are indirectly attached to the lipid bilayer of the liposomal core through a linker moiety.

[0019] In some embodiments, the linker moiety comprises a molecular species at the 3′ or 5′ terminus of the antisense oligonucleotide, wherein the molecular species is positioned in the liposomal core and the antisense oligonucleotide extends radially from the liposomal core.

[0020] In some embodiments, the molecular species is at the 5′ terminus of the antisense oligonucleotide. In some embodiments, the molecular species is attached to the linker moiety.

[0021] In some embodiments, the molecular species is a hydrophobic group.

[0022] In some embodiments, the hydrophobic group is selected from the group consisting of cholesterol, a cholesteryl or modified cholesteryl residue, tocopherol, adamantine, dihydrotesterone, long chain alkyl, long chain alkenyl, long chain alkynyl, olely-lithocholic, cholenic, oleoyl-cholenic, decane, dodecane, docosahexaenoyl, palmityl, C6-palmityl, heptadecyl, myrisityl, arachidyl, stearyl, behenyl, linoleyl, bile acids, cholic acid or taurocholic acid, deoxycholate, oleyl litocholic acid, oleoyl cholenic acid, glycolipids, phospholipids, sphingolipids, isoprenoids, such as steroids, vitamins, such as vitamin E, fatty acids either saturated or unsaturated, fatty acid esters, such as triglycerides, pyrenes, porphyrines, Texaphyrine, adamantane, acridines, biotin, coumarin, fluorescein, rhodamine, Texas-Red, digoxygenin, dimethoxytrityl, t-butyldimethylsilyl, t-butyldiphenylsilyl, cyanine dyes (e.g. Cy3 or Cy5), Hoechst 33258 dye, psoralen, or ibuprofen. In some embodiments, the hydrophobic group is cholesterol.

[0023] In some embodiments, the linker moiety comprises a non-nucleotidic linker moiety attached to the molecular species. In some embodiments, the non-nucleotidic linker moiety is selected from the group consisting of an abasic residue (dSpacer), oligoethyleneglycol, triethyleneglycol, hexaethylenegylcol, alkane-diol, or butanediol. In some embodiments, the non-nucleotidic linker moiety is a double linker. In some embodiments, the double linker is two oligoethyleneglycols. In some embodiments, the two oligoethyleneglycols are triethyleneglycol.

[0024] In some embodiments, the two oligoethyleneglycols are hexaethylenegylcol.

[0025] In some embodiments, the double linker is two alkane-diols. In some embodiments, the two alkane-diols are butanediol.

[0026] In some embodiments, the double linker is linked in the center by a phosphodiester, phosphorothioate, methylphosphonate, or amide linkage.

[0027] In some embodiments, the non-nucleotidic linker moiety is a triple linker. In some embodiments, the triple linker is three oligoethyleneglycols. In some embodiments, the three oligoethyleneglycols are triethyleneglycol. In some embodiments, the three oligoethyleneglycols are hexaethylenegylcol. In some embodiments, the triple linker is three alkane-diols. In some embodiments, the three alkane-diols are butanediol.

[0028] In some embodiments, the triple linker is linked in between each single linker by a phosphodiester, phosphorothioate, methylphosphonate, or amide linkage.

[0029] In some embodiments, the antisense oligonucleotides comprise the entire SNA such that no other structural components are part of the SNA and wherein the antisense oligonucleotide includes a molecular species and non-nucleotidic linker moiety that form the core, with the oligonucleotides extending radially from the core.

[0030] In some embodiments, the SNA is free of lipids, polymers or solid cores.

[0031] According to some aspects, the SNA comprises a core and a first antisense oligonucleotide comprised of 8 to 50 linked nucleosides in length targeted to a first region in a pre-mRNA of interest and a second antisense oligonucleotide comprised of 8 to 50 linked nucleosides in length targeted to second region in a pre-mRNA of interest to regulate pre-mRNA splicing, and wherein the antisense oligonucleotides are attached to the core and form an oligonucleotide shell.

[0032] In some embodiments, the first region in the pre-mRNA of interest is a regulatory site. In some embodiments, the second region in the pre-mRNA of interest is a long non-coding RNA (lncRNA).

[0033] In some embodiments, the oligonucleotide shell has a surface density of 5-1,000 oligonucleotides per SNA. In some embodiments, the oligonucleotide shell has a surface density of 100-1,000 oligonucleotides per SNA. In some embodiments, the oligonucleotide shell has a surface density of 500-1,000 oligonucleotides per SNA.

[0034] In some embodiments, the oligonucleotide shell has a surface density of at least 5, 10, 15, 20, 21, 22, 23, 24, 25, 26, 27, 28, 29, 30, 31, 32, 33, 34, 35, 36, 37, 38, 39, 40, 41, 42, 43, 44, 45, 46, 47, 48, 49, 50, 60, 70, 80, 90 or 100 oligonucleotides per SNA. In some embodiments, the oligonucleotide shell has a surface density of about 5, 10, 15, 20, 21, 22, 23, 24, 25, 26, 27, 28, 29, 30, 31, 32, 33, 34, 35, 36, 37, 38, 39, 40, 41, 42, 43, 44, 45, 46, 47, 48, 49, 50, 60, 70, 80, 90 or 100 oligonucleotides per SNA. It will be recognized that the oligonucleotide shell surface density can be expressed as molar ratio of oligonucleotides to lipid which forms the liposome core. In certain embodiments, the lipid to oligonucleotide ratio is 200:1, 150:1, 100:1, 75:1, 70:1, 65:1, 60:1, 55:1, 50:1, 45:1, 40:1, 35:1, 30:1, 25:1, 20:1, 15:1, 10:1, and 5:1.

[0035] In some embodiments, the lipid bilayer comprises one or more lipids selected from the group consisting of: sphingolipids such as sphingosine, sphingosine phosphate, methylated sphingosines and sphinganines, ceramides, ceramide phosphates, 1-0 acyl ceramides, dihydroceramides, 2-hydroxy ceramides, sphingomyelin, glycosylated sphingolipids, sulfatides, gangliosides, phosphosphingolipids, and phytosphingosines of various lengths and saturation states and their derivatives, phospholipids such as phosphatidylcholines, lysophosphatidylcholines, phosphatidic acids, lysophosphatidic acids, cyclic LPA, phosphatidylethanolamines, lysophosphatidylethanolamines, phosphatidylglycerols, lysophosphatidylglycerols, phosphatidylserines, lysophosphatidylserines, phosphatidylinositols, inositol phosphates, LPI, cardiolipins, lysocardiolipins, bis(monoacylglycero) phosphates, (diacylglycero) phosphates, ether lipids, diphytanyl ether lipids, and plasmalogens of various lengths, saturation states, and their derivatives, sterols such as cholesterol, desmosterol, stigmasterol, lanosterol, lathosterol, diosgenin, sitosterol, zymosterol, zymostenol, 14-demethyl-lanosterol, cholesterol sulfate, DHEA, DHEA sulfate, 14-demethyl-14-dehydrlanosterol, sitostanol, campesterol, ether anionic lipids, ether cationic lipids, lanthanide chelating lipids, A-ring substituted oxysterols, B-ring substituted oxysterols, D-ring substituted oxysterols, side-chain substituted oxysterols, double substituted oxysterols, cholestanoic acid derivatives, fluorinated sterols, fluorescent sterols, sulfonated sterols, phosphorylated sterols, and polyunsaturated sterols of different lengths, saturation states, and derivatives thereof.

[0036] In some embodiments, the lipid bilayer is comprised of 1,2-dioleoyl-sn-glycero-3-phosphocholine (DOPC).

[0037] According to some aspects, the SNA comprises a core and a first antisense oligonucleotide comprised of 8 to 50 linked nucleosides in length targeted to a regulatory site and a second antisense oligonucleotide comprised of 8 to 50 linked nucleosides in length targeted to a region of a lncRNA, and wherein the antisense oligonucleotides are attached to the core and form an oligonucleotide shell.

[0038] According to some aspects, the SNA comprises a core and antisense oligonucleotides arranged in an oligonucleotide shell, wherein the oligonucleotides comprise a nucleotide backbone comprising a modification in one or more of the carbons in the five-carbon sugar, and wherein five nucleotides or fewer than five nucleotides do not comprise a modification in the five-carbon sugar.

[0039] In some embodiments, four nucleotides or fewer than four nucleotides do not comprise a modification in the five-carbon sugar. In some embodiments, three nucleotides or fewer than three nucleotides do not comprise a modification in the five-carbon sugar. In some embodiments, two nucleotides or fewer than two nucleotides do not comprise a modification in the five-carbon sugar. In some embodiments, one nucleotide does not comprise a modification in the five-carbon sugar. In some embodiments, the modification is not at the 2′-carbon position of the five-carbon sugar.

[0040] In some embodiments, all of the nucleotides in the nucleotide backbone of the antisense oligonucleotides comprise a modification in one or more of the carbons in the five-carbon sugar.

[0041] In some embodiments, the modification is at the 2′-carbon position of the five-carbon sugar. In some embodiments, the modification is a 2′-O-methylated nucleotide. In some embodiments, the antisense oligonucleotide comprises the nucleic acid sequence CCCACAGGGGCATGUAGU (SEQ ID NO: 58). In some embodiments, the antisense oligonucleotide comprises or consists of the nucleic acid sequence mCmCmCmAmCmAmGmG*mG*mG*mC*mA*mT*mGmUmAmGmU (SEQ ID NO: 59), wherein * is a phosphorothioate linkage and m is a 2′-O-methylated nucleotide. In some embodiments, the antisense oligonucleotide comprises the nucleic acid sequence mCmCmCmAmCmAmGmG*mG*mG*mC*mA*mT*mGmUmAmGmU/Spacer18/Spacer18/3 CholTEG (SEQ ID NO: 211), wherein * is a phosphorothioate linkage, m is a 2′-O-methylated nucleotide, Spacer18 is a hexa(ethylene glycol) spacer, and 3CholTEG is tri(ethylene glycol) bound to a cholesterol.

[0042] According to some aspects, the SNA comprises an antisense oligonucleotide comprised of 8 to 50 linked nucleosides in length targeted to a regulatory site of a pre-mRNA of interest and a linker moiety comprising a molecular species at the 3′-end or the 5′-end of the antisense oligonucleotide, wherein the molecular species is a hydrophobic group comprising a stearyl.

[0043] In some embodiments, the stearyl is a distearyl.

[0044] According to some aspects, the SNA is an SNA for regulating pre-mRNA splicing, comprising a core and an antisense oligonucleotide comprised of 8 to 50 linked nucleosides in length targeted to a regulator of splicing of a pre-mRNA of interest to regulate pre-mRNA splicing, and wherein the antisense oligonucleotide is attached to the core and forms an oligonucleotide shell.

[0045] In some embodiments, the regulator regulates the inclusion of exons and/or introns in a mRNA of interest.

[0046] In some embodiments, the regulator is an RNA binding protein, a splicing factor or a ribonucleoprotein.

[0047] According to some aspects, a composition is contemplated herein. In some embodiments, the composition comprises a SNA disclosed herein in a pharmaceutically acceptable carrier.

[0048] In some embodiments, the composition comprises a first spherical nucleic acid (SNA) comprising a core and a first antisense oligonucleotide comprised of 10 to 40 linked nucleosides in length targeted to a first region in a pre-mRNA of interest, and a second SNA comprising a core and a second antisense oligonucleotide comprised of 10 to 40 linked nucleosides in length targeted to a second region in the pre-mRNA of interest.

[0049] According to some aspects, methods for treating a subject having a disease or disorder related to an abnormality in splice modulation are contemplated herein.

[0050] In some embodiments, the method comprises administering to a subject having the disease or disorder related to an abnormality in splice modulation a spherical nucleic acid (SNA) described herein in an effective amount to increase expression levels of a protein of interest or corrected mRNA over a baseline level in the subject in order to treat the disease or disorder related to an abnormality in splice modulation.

[0051] In some embodiments, the disease or disorder related to an abnormality in splice modulation is Stargardt Disease (Juvenile Macular Degeneration), Usher Syndrome, X-Linked Retinoschisis, macular corneal dystrophy, Congenital stromal corneal dystrophy, Congenital hereditary endothelial corneal dystrophy, Fleck corneal dystrophy, lattice corneal dystrophy type I, lattice corneal dystrophy type II, granular corneal dystrophy type I, granular corneal dystrophy type II (Avellino), Epithelial recurrent erosion dystrophy, Stocker-Holt corneal dystrophy, Duchennes Muscular Dystrophy, Leber Congenital Amaurosis, B-Thalassemia, Meesmann Endothelial Corneal Dystrophy, Menkes Disease, Nijmegen Breakage Syndrome, Hutchison-Gilford Progeria Syndrome, Gelatinous droplike corneal dystrophy, Reis-Buckler corneal dystrophy, Schnyder crystalline corneal dystrophy, Subepithelial mucinous corneal dystrophy, Lisch corneal dystrophy, Posterior amorphous corneal dystrophy, X-linked endothelial corneal dystrophy, Thiel-Behnke corneal dystrophy, Posterior polymorphous corneal dystrophy, Pompe, Familial Hypertrophic Cardiomyopathy, X-Linked Aggamaglobulinemia, Oculopharyngeal Muscular Dystrophy, Dilated Cardiomyopathy, Frontotemporal Dementia, epithelial basement membrane corneal dystrophy, Alzheimer's Disease, Familial Hypercholesterolemia, a pro-inflammatory disease, Huntington's disease, Fukuyama congenital muscular dystrophy, Myotonic Dystrophy Type I or II, Cancer, Neovascularization, Ataxia telangiectasia, Congenital disorder of glycosylation, FTD/Parkinsonism linked to chr17, Niemann Pick disease type C, Neurofibromatosis type 1, Neurofibromatosis type 2, Megalencephalic leukoencephalopathy with subcortical cysts type 1, Pelizaeus-Merzbacher disease, Spinocerebellar Ataxia Type 7, Spinocerebellar Ataxia Type 17, Huntington's disease, Spinocerebellar Ataxia Type 1, Spinocerebellar Ataxia Type 12, Spinal and bulbar muscular atrophy, Spinocerebellar Ataxia Type 2, Spinocerebellar Ataxia Type 6, Dentatorubral-pallidoluysian atrophy, Spinocerebellar Ataxia Type 3, Spinocerebellar Ataxia Type 8, Huntington disease-like-2, Myotonic Dystrophy Type I, Fuchs Endothelial Corneal Dystrophy. Fragile X syndrome, fragile X-associated tremor/ataxia syndrome, Fragile XE syndrome, Friedreich ataxia, Myotonic Dystrophy Type II, Spinocerebellar Ataxia Type 10, Spinocerebellar Ataxia Type 31, Spinocerebellar Ataxia Type 36, C9orf72-ALS/FTD, or Prader-Willi syndrome.

[0052] In some embodiments, the disease or disorder related to an abnormality in splice modulation is Duchennes Muscular Dystrophy, Leber Congenital Amaurosis, B-Thalassemia, a pro-inflammatory disease, Huntington's disease, Spinocerebellar Ataxia Type 7, Spinocerebellar Ataxia Type 17, Huntington's disease, Spinocerebellar Ataxia Type 1, Huntington disease-like-2, or Prader-Willi syndrome.

[0053] In some embodiments, the baseline level is the level of the protein of interest in the subject prior to treatment with the SNA. In some embodiments, the baseline level is the level of the protein of interest in a subject having the disease or disorder related to an abnormality in splice modulation and treated with a linear antisense oligonucleotide targeted to a region in a pre-mRNA of interest to regulate pre-mRNA splicing.

[0054] In some embodiments, the SNA is delivered by a route of administration selected from the group consisting of intrathecal, oral, nasal, sublingual, intravenous, subcutaneous, mucosal, respiratory, direct injection, and dermal routes of administration.

[0055] In some embodiments, the SNA is a SNA disclosed herein.

[0056] According to some aspects, methods for treating a subject having the disease or disorder related to an abnormality in splice modulation comprises administering to a subject having a disease or disorder related to an abnormality in splice modulation at least two doses of a spherical nucleic acid (SNA), in an effective amount to increase expression levels of a protein of interest or corrected mRNA over a baseline level in the subject in order to treat the disease or disorder related to an abnormality in splice modulation, wherein the second dose is administered about 3 months to 2 years after the first dose, and wherein the SNA comprises a core and an antisense oligonucleotide comprised of 8 to 50 linked nucleosides in length targeted to a region in a pre-mRNA of interest, such that a level of a protein of interest or a level of a corrected mRNA relative to a defective mRNA associated with the disease or disorder related to an abnormality in splice modulation in the subject is enhanced. In some embodiments, the oligonucleotides are attached to the core and thus form an oligonucleotide shell. In some embodiments, the corrected mRNA produces a functional protein of interest to treat the subject having the disease or disorder related to an abnormality in splice modulation.

[0057] In some embodiments, the region is a regulatory region or regulatory site.

[0058] In some embodiments, the disease or disorder related to an abnormality in splice modulation is Stargardt Disease (Juvenile Macular Degeneration), Usher Syndrome, X-Linked Retinoschisis, macular corneal dystrophy, Congenital stromal corneal dystrophy, Congenital hereditary endothelial corneal dystrophy, Fleck corneal dystrophy, lattice corneal dystrophy type I, lattice corneal dystrophy type II, granular corneal dystrophy type I, granular corneal dystrophy type II (Avellino), Epithelial recurrent erosion dystrophy, Stocker-Holt corneal dystrophy, Duchennes Muscular Dystrophy, Leber Congenital Amaurosis, B-Thalassemia, Meesmann Endothelial Corneal Dystrophy, Menkes Disease, Nijmegen Breakage Syndrome, Hutchison-Gilford Progeria Syndrome, Gelatinous droplike corneal dystrophy, Reis-Buckler corneal dystrophy, Schnyder crystalline corneal dystrophy, Subepithelial mucinous corneal dystrophy, Lisch corneal dystrophy, Posterior amorphous corneal dystrophy, X-linked endothelial corneal dystrophy, Thiel-Behnke corneal dystrophy, Posterior polymorphous corneal dystrophy, Pompe, Familial Hypertrophic Cardiomyopathy, X-Linked Aggamaglobulinemia, Oculopharyngeal Muscular Dystrophy, Dilated Cardiomyopathy, Frontotemporal Dementia, epithelial basement membrane corneal dystrophy, Alzheimer's Disease, Familial Hypercholesterolemia, a pro-inflammatory disease, Huntington's disease, Fukuyama congenital muscular dystrophy, Myotonic Dystrophy Type I or II, Cancer, Neovascularization, Ataxia telangiectasia, Congenital disorder of glycosylation, FTD/Parkinsonism linked to chr17, Niemann Pick disease type C, Neurofibromatosis type 1, Neurofibromatosis type 2, Megalencephalic leukoencephalopathy with subcortical cysts type 1, Pelizaeus-Merzbacher disease, Spinocerebellar Ataxia Type 7, Spinocerebellar Ataxia Type 17, Huntington's disease, Spinocerebellar Ataxia Type 1, Spinocerebellar Ataxia Type 12, Spinal and bulbar muscular atrophy, Spinocerebellar Ataxia Type 2, Spinocerebellar Ataxia Type 6, Dentatorubral-pallidoluysian atrophy, Spinocerebellar Ataxia Type 3, Spinocerebellar Ataxia Type 8, Huntington disease-like-2, Myotonic Dystrophy Type I, Fuchs Endothelial Corneal Dystrophy, Fragile X syndrome, fragile X-associated tremor/ataxia syndrome, Fragile XE syndrome, Friedreich ataxia, Myotonic Dystrophy Type II, Spinocerebellar Ataxia Type 10, Spinocerebellar Ataxia Type 31, Spinocerebellar Ataxia Type 36. C9orf72-ALS/FTD, or Prader-Willi syndrome.

[0059] In some embodiments, the disease or disorder related to an abnormality in splice modulation is Duchennes Muscular Dystrophy, Leber Congenital Amaurosis, B-Thalassemia, a pro-inflammatory disease, Huntington's disease, Spinocerebellar Ataxia Type 7, Spinocerebellar Ataxia Type 17, Huntington's disease. Spinocerebellar Ataxia Type 1, Huntington disease-like-2, or Prader-Willi syndrome.

[0060] According to some aspects, methods of enhancing the level of the corrected mRNA relative to a defective mRNA associated with or related to an abnormality in splice modulation in a cell are contemplated herein.

[0061] In some embodiments, the cell is contacted with a spherical nucleic acid (SNA) comprising a core and an antisense oligonucleotide comprised of 10 to 40 linked nucleosides in length targeted to a region in a pre-mRNA of interest, such that the level of a corrected mRNA relative to a defective mRNA in the cell is enhanced.

[0062] In some embodiments, the SNA is a SNA disclosed herein.

[0063] According to some aspects, a spherical nucleic acid (SNA) for regulating pre-mRNA splicing, comprising a core and an antisense oligonucleotide comprised of 8 to 50 linked nucleosides in length targeted to a regulator of splicing of a pre-mRNA of interest to regulate pre-mRNA splicing, and wherein the antisense oligonucleotide is attached to the core and forms an oligonucleotide shell is contemplated herein.

[0064] In some embodiments, the regulator regulates the inclusion of exons and/or introns in a mRNA of interest. In some embodiments, the regulator is an RNA binding protein, a splicing factor or a ribonucleoprotein.

[0065] According to some aspects, methods for treating a subject having a disease or disorder related to an abnormality in splice modulation are contemplated herein. In some embodiments, the method comprises administering to a subject having the disease or disorder related to an abnormality in splice modulation a SNA in an effective amount to decrease expression levels of a protein of interest under a baseline level in the subject in order to treat the disease or disorder related to an abnormality in splice modulation.

[0066] In some embodiments, the SNA is a SNA disclosed herein.

[0067] In some embodiments, the antisense oligonucleotide has locked nucleic acid (LNA) modifications. In some embodiments, less than all of the nucleotides in the antisense oligonucleotide include a LNA modification. In some embodiments, all of the nucleotides in the antisense oligonucleotide include a LNA modification. In some embodiments, the antisense oligonucleotide has morpholino modifications. In some embodiments, less than all of the nucleotides in the antisense oligonucleotide include a morpholino modification. In some embodiments, all of the nucleotides in the antisense oligonucleotide include a morpholino modification.

[0068] According to some aspects, methods of producing a splice variant susceptible to nonsense-mediated decay are contemplated herein. In some embodiments, the method comprises contacting a cell with a SNA comprising oligonucleotides arranged in an oligonucleotide shell and a core in an affective amount to produce a splice variant susceptible to nonsense-mediated decay.

[0069] According to some aspects, methods of treating a disease or disorder in a subject are contemplated herein. In some embodiments, the method comprises administering to a subject an effective amount of a SNA comprising oligonucleotides arranged in an oligonucleotide shell and a core to produce a splice variant susceptible to nonsense-mediated decay in order to treat the disease or disorder in the subject.

[0070] In some embodiments, the SNA is administered to the subject by an administration route selected from the group consisting of intrathecal, oral, nasal, sublingual, intravenous, subcutaneous, mucosal, respiratory, direct injection, and dermal route of administration.

[0071] In some embodiments, the SNA is a SNA disclosed herein.

[0072] In some embodiments, the disease or disorder is cancer. In some embodiments, the cancer is selected from the group consisting of melanoma, renal cancer, clear cell carcinoma, prostate cancer, hormone refractory prostate adenocarcinoma, breast cancer, colon cancer, lung cancer, non-small cell lung cancer, small cell lung cancer, bone cancer, pancreatic cancer, pancreatic adenocarcinoma, skin cancer, cancer of the head or neck, cutaneous or intraocular malignant melanoma, uterine cancer, ovarian cancer, rectal cancer, stomach cancer, testicular cancer, thyroid cancer, anaplastic thyroid cancer, uterine cancer, carcinoma of the fallopian tubes, carcinoma of the endometrium, carcinoma of the cervix, Hodgkin's Disease, non-Hodgkin's lymphoma, cancer of the esophagus, cancer of the small intestine, cancer of the endocrine system, cancer of the thyroid gland, cancer of the parathyroid gland, cancer of the adrenal gland, sarcoma of soft tissue, cancer of the urethra, chronic or acute leukemias including acute myeloid leukemia, chronic myeloid leukemia, acute lymphoblastic leukemia, chronic lymphocytic leukemia, solid tumors of childhood, lymphocytic lymphoma, cancer of the bladder, cancer of the kidney or ureter, carcinoma of the renal pelvis, neoplasm of the central nervous system (CNS), primary CNS lymphoma, tumor angiogenesis, spinal axis tumor, brain stem glioma, pituitary adenoma, Kaposi's sarcoma, epidermoid cancer, squamous cell cancer, T-cell lymphoma, biliary tract cancer, brain cancer, breast cancer, cervical cancer, choriocarcinoma, esophageal cancer, gastric cancer, an intraepithelial neoplasm, lymphoma, liver cancer, neuroblastoma, oral cancer, sarcoma, hairy cell leukemia, chronic myelogenous leukemia, cutaneous T-cell leukemia, multiple myeloma, renal cell carcinoma, lymphoma, bladder cancer, glioblastoma multiforme, Merkel cell carcinoma, cutaneous squamous cell carcinoma, melanoma or squamous cell carcinoma of the head and neck. In some embodiments, the cancer is environmentally-induced cancers, including those induced by asbestos, or any combinations thereof. In some embodiments, the cancer is not melanoma.

[0073] In some embodiments, the cancer is selected from the group consisting of pleomorphic sarcoma, gastrointestinal stromal tumor (GIST), liposarcoma, leiomyosarcoma, synovial sarcoma, malignant peripheral nerve sheath tumor, rhabdomyosarcoma, angiosarcoma, fibrosarcoma, dermatofibrosarcoma protuberans, epithelioid sarcoma, myxoma, mesenchymoma, vascular sarcoma, neurilemmoma, bone sarcoma, osteosarcoma, Ewing's sarcoma, chondrosarcoma, Kaposi sarcoma, solitary fibrous tumor, chordoma, desmoid-type fibromatosis, fibroblastic sarcoma, giant cell tumor of the bone, gynaecological sarcoma, soft tissue sarcoma, angioleiomyoma, leiomyoma, smooth muscle sarcoma, fibrohistiocytic sarcoma, sebaceous cell carcinoma and eccrine carcinoma. In some embodiments, the cancer is characterized as microsatellite instability high, or MSI-H, or mismatch repair deficient, or dMMR. MSI-H or dMMR cancers are characterized by defects in DNA replication, particularly in the microsatellite regions. The presence of MSI-H and dMMR tumors has been reported in diverse cancer types, including colon, colorectal, endometrial, biliary, gastric, gastroesophageal junction, pancreatic, small intestinal, breast, triple negative breast, prostate, bladder, esophageal, sarcoma, thyroid, retroperitoneal adenocarcinoma, small cell lung, ovarian, pancreatic, prostate, central nervous system, and non-small cell lung cancers.

[0074] In some embodiments, the disease or disorder is an inflammatory disease or disorder.

[0075] In some embodiments, the inflammatory disease or disorder is selected from the group consisting of an autoimmune disease, an infectious disease, transplant rejection or graft-versus-host disease, a pulmonary disorder, an intestinal disorder, a cardiac disorder, sepsis, a spondyloarthropathy, a metabolic disorder, a hepatic disorder, a skin disorder and a nail disorder.

[0076] In some embodiments, the inflammatory disease or disorder is selected from the group consisting of atopic dermatitis, epidermolysis bullosa, uveitis, gout, polymyalgia rheumatica, osteoarthritis, systemic-onset juvenile idiopathic arthritis, schnitzler syndrome, familial mediterranean fever, cryopyrin-associated periodic syndrome (CAPS), hyper-igd syndrome (HIDS), TNF receptor-associated periodic syndrome (TRAPs), type 2 diabetes, proliferative diabetic retinopathy, wet age-related macular degeneration, chronic obstructive pulmonary disease, type 1 diabetes, pyoderma gangrenosum, dry eye syndrome, and acne vulgaris, rheumatoid arthritis, psoriasis, psoriatic arthritis, psoriasis in combination with psoriatic arthritis, ulcerative colitis, Crohn's disease, vasculitis, Behcet's disease, ankylosing spondylitis, asthma, chronic obstructive pulmonary disorder (COPD), idiopathic pulmonary fibrosis (IPF), restenosis, anemia, pain and hepatitis C virus infection.

[0077] In some embodiments, the autoimmune disease is selected from the group consisting of rheumatoid arthritis, rheumatoid spondylitis, osteoarthritis, gouty arthritis, allergy, multiple sclerosis, autoimmune uveitis, and nephritic syndrome.

[0078] According to some aspects, methods of increasing the levels of a soluble variant of a transmembrane receptor in a cell are contemplated herein. In some embodiments, the method comprises contacting a cell with an effective amount of a SNA that modulates splicing of the pre-mRNA of a transmembrane receptor to produce a soluble variant of the transmembrane receptor such that the level of soluble variant of the transmembrane receptor is increased relative to a cell that has not been contacted with the SNA or relative to a cell contacted with the corresponding linear oligonucleotide not in a SNA, wherein the levels of the mRNA encoding the transmembrane receptor are not decreased through RNAse-H mediated degradation.

[0079] In some embodiments, the transmembrane receptor is an ion channel linked receptor, and enzyme-linked receptor, or a G protein-coupled receptor. In some embodiments, the transmembrane receptor is an adrenergic receptor, an olfactory receptor, a receptor tyrosine kinase, an epidermal growth factor receptor, an insulin receptor, a fibroblast growth factor receptor, a neurotrophin receptor, an ephrin receptor, an integrin, a low affinity nerve growth factor receptor, a N-methyl-D-aspartate (NMDA) receptor, or an immune receptor. In some embodiments, the transmembrane receptor is a toll-like receptor, a T-cell receptor, a cluster of differentiation 28 (CD28), or a csk-interacting membrane (SCIMP) protein.

[0080] In some embodiments, the immune receptor is a pattern recognition receptor, a killer activated receptor, a killer inhibitor receptor, a complement receptor, an Fc receptor, a B cell receptor, a T cell receptor, or a cytokine receptor.

[0081] In some embodiments, the SNA is a SNA disclosed herein.

[0082] In some embodiments, the SNA is in a solution at a concentration of between about 100 nM to 1 μM. In some embodiments, the SNA is in a solution at a concentration of or about 0.5 μM, of or about 1 μM, or of or about 5 μM.

[0083] In some embodiments, the cell is brain cell, liver cell, lung cell, gut cell, stomach cell, intestine cell, fat cell, muscle cell, uterine cell, skin cell, spleen cell, endocrine organ cell, or bone cell.

[0084] In some embodiments, the SNA is in a pharmaceutically acceptable carrier that is a gel formulation.

[0085] In some embodiments, the cell is contacted with the SNA in vitro. In some embodiments, the cell is contacted with the SNA in vivo. In some embodiments, the cell is contacted with the SNA ex vivo.

[0086] According to some aspects, methods of treating a disease or disorder in a subject are contemplated herein. In some embodiments, the method comprises administering to a subject with a disease or disorder associated with abnormal transmembrane receptor activity or abnormal transmembrane receptor expression in a cell of the subject an effective amount of a spherical nucleic acid (SNA) to produce or increase the levels of a soluble variant of the transmembrane receptor in the subject relative to a subject with a disease or disorder associated with abnormal transmembrane receptor activity or abnormal transmembrane receptor expression who has not been administered a SNA or relative to a subject with a disease or disorder associated with abnormal transmembrane receptor activity or abnormal transmembrane receptor expression who has been administered a corresponding linear oligonucleotide that is not in a SNA, in order to treat the disease or disorder in the subject.

[0087] In some embodiments, the total levels of the transmembrane receptor in the cell of the subject remains stable or the total levels of the mRNA encoding the transmembrane receptor are not decreased through RNAse-H mediated degradation.

[0088] In some embodiments, the SNA is a SNA disclosed herein.

[0089] In some embodiments, the disease or disorder is atopic dermatitis or psoriasis.

[0090] In some embodiments, the transmembrane receptor is interleukin 17 receptor α (IL17RA) or IL1 receptor accessory protein (IL1RAP).

[0091] In some embodiments, the SNA is administered to the subject by an administration route selected from the group consisting of intrathecal, oral, nasal, sublingual, intravenous, subcutaneous, mucosal, respiratory, direct injection, and dermal route of administration.

[0092] According to some aspects, methods of increasing the levels of a mRNA of interest in a cell are contemplated herein. In some embodiments, the method comprises contacting the cell with a SNA disclosed herein, wherein the levels of the mRNA of interest in the cell is increased relative to a cell that has not been contacted with the SNA or relative to a cell contacted with the corresponding linear oligonucleotide not in a SNA.

[0093] According to some aspects, methods of inducing exon skipping in a pre-mRNA of interest in a cell are contemplated herein. In some embodiments, the method comprises contacting a cell with a SNA disclosed herein to induce exon skipping in a pre-mRNA of interest in the cell.

[0094] According to some aspects, methods of inducing exon inclusion in a pre-mRNA of interest in a cell are contemplated herein. In some embodiments, the method comprises contacting a cell with a SNA disclosed herein to induce exon inclusion in a pre-mRNA of interest in the cell.

[0095] According to some aspects, methods for delivering a stable level of antisense oligonucleotides to a central nervous system (CNS) of a subject having a CNS disease or disorder are contemplated herein. In some embodiments, the method comprises administering to a subject having a neurodegenerative disease or disorder a spherical nucleic acid (SNA) in an effective amount to deliver antisense oligonucleotides to the CNS of the subject, wherein the administration of SNA delivers about 2% to about 150% more antisense oligonucleotides to one or more tissues or regions of the CNS of the subject than administration of linear antisense oligonucleotides that are not in a SNA, wherein the SNA comprises a core and antisense oligonucleotides comprised of 10 to 60 linked nucleosides in length, wherein the antisense oligonucleotides are attached to the core and thus form an oligonucleotide shell, wherein the CNS disease or disorder is not autism. Alzheimer's disease. Parkinson's disease, spinal muscular atrophy, or characterized by muscle wasting and/or loss of muscle function.

[0096] In some embodiments, the CNS disease or disorder is encephalitis, poliomyelitis, essential tremor, multiple sclerosis, cancer of the nervous system, addiction, attention deficit/hyperactivity disorder (ADHD), bipolar disorder, catalepsy, depression, epilepsy/seizures, infection, locked-in syndrome, meningitis, migraine, myelopathy or Tourette's syndrome.

[0097] In some embodiments, the SNA is administered intrathecally (IT). In some embodiments, the SNA is administered in the lower lumbar region. In some embodiments, the SNA is IT-administered through a lumbar puncture.

[0098] In some embodiments, the subject is a mammal. In some embodiments, the subject is a rat or mouse. In some embodiments, the subject is a human.

[0099] In some embodiments, a stable level is achieved when at least 50% of the antisense oligonucleotides are present in a tissue of the CNS within three days of administration of the SNA to the subject, relative to the amount of antisense oligonucleotides present in the tissue of the CNS within one hour of administration of the SNA to the subject. In some embodiments, a stable level is achieved when at least 50% of the antisense oligonucleotides are present in a tissue of the CNS within 48 hours of administration of the SNA to the subject, relative to the amount of antisense oligonucleotides present in the tissue of the CNS within one hour of administration of the SNA to the subject. In some embodiments, a stable level is achieved when at least 50% of the antisense oligonucleotides are present in a tissue of the CNS within 24 hours of administration of the SNA to the subject, relative to the amount of antisense oligonucleotides present in the tissue of the CNS within one hour of administration of the SNA to the subject.

[0100] In some embodiments, less than 50% of the antisense oligonucleotides are detectable within six hours of administration to the subject in one or both kidneys of the subject. In some embodiments, less than 40% of the antisense oligonucleotides are detectable within six hours of administration to the subject in one or both kidneys of the subject. In some embodiments, less than 30% of the antisense oligonucleotides are detectable within six hours of administration to the subject in one or both kidneys of the subject. In some embodiments, less than 20% of the antisense oligonucleotides are detectable within six hours of administration to the subject in one or both kidneys of the subject. In some embodiments, less than 10% of the antisense oligonucleotides are detectable within six hours of administration to the subject in one or both kidneys of the subject. In some embodiments, less than 5% of the antisense oligonucleotides are detectable within six hours of administration to the subject in one or both kidneys of the subject.

[0101] In some embodiments, the SNA is a SNA disclosed herein.

[0102] In some embodiments, the SNA is in a formulation and wherein the formulation comprises artificial cerebral spinal fluid (aCSF).

[0103] In some embodiments, the one or more tissues or regions of the CNS is one or more regions of the brain.

[0104] In some embodiments, the one or more regions of the brain is selected from the group consisting of the amygdala, basal ganglia, cerebellum, corpus callosum, cortex, hippocampus, hypothalamus, midbrain, olfactory region, one or more ventricles, septal area, white matter and thalamus.

[0105] In some embodiments, the one or more tissues or regions of the CNS are the cervical cerebral spinal fluid (CSF) or thoracic CSF.

[0106] In some embodiments, the antisense oligonucleotides in the SNA have different routes of distribution and clearance from the corresponding linear antisense oligonucleotides that are not in a SNA.

[0107] According to some aspects, methods of increasing expression of a mRNA of interest in a cell are contemplated herein. In some embodiments, the method comprises contacting the cell with a first spherical nucleic acid (SNA) comprising a core and a first antisense oligonucleotide comprised of 10 to 40 linked nucleosides in length targeted to a first region in a pre-mRNA of interest, and contacting the cell with a second SNA comprising a core and a second antisense oligonucleotide comprised of 10 to 40 linked nucleosides in length targeted to a second region in the pre-mRNA of interest, wherein the first antisense oligonucleotide in the first SNA and the second antisense oligonucleotide in the second SNA modulate splicing of the pre-mRNA of interest to increase the levels of the mRNA of interest in the cell relative to a cell that has not been contacted with the SNA or relative to a cell contacted with the corresponding linear oligonucleotide not in a SNA.

[0108] In some embodiments, the first antisense oligonucleotide in the first SNA and the second antisense oligonucleotide in the second SNA work synergistically.

[0109] In some embodiments, the first SNA or the second SNA is a SNA disclosed herein.

[0110] In some embodiments, the first SNA and the second SNA is a SNA disclosed herein.

[0111] In some embodiments, the SNA comprises a core and the first antisense oligonucleotide and the second antisense oligonucleotide attached to the same core.

[0112] According to some aspects, methods of increasing the levels of a mRNA of interest in a cell are contemplated herein. In some embodiments, the method comprises contacting a cell with a spherical nucleic acid (SNA) comprising a core and a first antisense oligonucleotide comprised of 10 to 40 linked nucleosides in length targeted to a first region in a pre-mRNA of interest and a second antisense oligonucleotide comprised of 10 to 40 linked nucleosides in length targeted to a second region in the pre-mRNA of interest, wherein the first antisense oligonucleotide and the second antisense oligonucleotide modulate splicing of the pre-mRNA of interest to increase the levels of the mRNA of interest in the cell, relative to a cell that has not been contacted with the SNA or relative to a cell contacted with the corresponding linear oligonucleotide not in a SNA.

[0113] In some embodiments, the first antisense oligonucleotide and the second antisense oligonucleotide work synergistically.

[0114] In some embodiments, the SNA is a SNA disclosed herein.

[0115] In some embodiments, the SNA comprises a core and the first antisense oligonucleotide and the second antisense oligonucleotide attached to the same core.

[0116] According to some aspects, methods are disclosed for delivering a stable level of antisense oligonucleotides to a central nervous system (CNS) of a subject having a CNS disease or disorder comprises administering to a subject having a neurodegenerative disease or disorder a spherical nucleic acid (SNA) in an effective amount to deliver a first antisense oligonucleotide and a second antisense oligonucleotide to the CNS of the subject, wherein the administration of SNA delivers about 2% to about 150% more antisense oligonucleotides to one or more tissues or regions of the CNS of the subject than administration of linear antisense oligonucleotides that are not in a SNA, wherein the SNA comprises a core and antisense oligonucleotides comprised of 10 to 60 linked nucleosides in length, wherein the antisense oligonucleotides are attached to the core and thus form an oligonucleotide shell.

[0117] According to some aspects, methods are disclosed for delivering a stable level of antisense oligonucleotides to a central nervous system (CNS) of a subject having a CNS disease or disorder, the method comprising administering to a subject having a neurodegenerative disease or disorder a first spherical nucleic acid (SNA) in an effective amount to deliver a first antisense oligonucleotide and a second SNA to deliver a second antisense oligonucleotide to the CNS of the subject, wherein the administration of SNA delivers about 2% to about 150% more antisense oligonucleotides to one or more tissues or regions of the CNS of the subject than administration of linear antisense oligonucleotides that are not in a SNA, wherein the SNA comprises a core and antisense oligonucleotides comprised of 10 to 60 linked nucleosides in length, wherein the antisense oligonucleotides are attached to the core and thus form an oligonucleotide shell.

[0118] In some embodiments, the CNS disease or disorder is SMA.

[0119] Each of the limitations of the invention can encompass various embodiments of the invention. It is, therefore, anticipated that each of the limitations of the invention involving any one element or combinations of elements can be included in each aspect of the invention. This invention is not limited in its application to the details of construction and the arrangement of components set forth in the following description or illustrated in the drawings. The invention is capable of other embodiments and of being practiced or of being carried out in various ways.

[0120] Also, the phraseology and terminology used herein is for the purpose of description and should not be regarded as limiting. The use of “including,” “comprising,” or “having,” “containing”, “involving”, and variations thereof herein, is meant to encompass the items listed thereafter and equivalents thereof as well as additional items.

### BRIEF DESCRIPTION OF DRAWINGS

[0121] The accompanying drawings are not intended to be drawn to scale. In the drawings, each identical or nearly identical component that is illustrated in various figures is represented by a like numeral. For purposes of clarity, not every component may be labeled in every drawing. In the drawings:

[0122] FIGS. 1A-1B show the fold increase of SMN2 mRNA over SMN Δ7 mRNA following 48 hour treatment of SMA patient-derived fibroblasts with the compounds. FIG. 1A (Full-length SMN mRNA) and FIG. 1B (Δ7 SMN mRNA) FIGS. 2A-2B show SMN2 protein, mRNA detection and quantification (72 hours). FIG. 2A Western blot showing total SMN protein and loading control GRP94. FIG. 2B is a densitometric quantification of SMN western blot (solid bars) and qRT-PCR of full-length SMN mRNA (hashed bars) from identically treated wells.

[0123] FIGS. 3A-3D show that SNAs designed to induce exon skipping of IL17RA are more potent than linear oligonucleotides in vitro. FIG. 3A shows expression of transmembrane IL17RA after 48 hours in vitro treatment of HaCaTs, FIG. 3B shows expression of transmembrane IL17RA after 48 hours in vitro treatment of HFKs FIG. 3C shows endpoint PCR readout of HaCaT samples showing clear shift to soluble isoform following IL17RA SNA treatment, FIG. 3D shows quantification of band intensity for corresponding endpoint PCR.

[0124] FIGS. 4A-4B show that SNAs designed to induce exon skipping of IL17RA are more potent than linear oligonucleotides ex vivo. FIG. 4A shows expression of transmembrane IL17RA after 1.7 mM ex vivo, gel-based, topical treatment of human skin biopsies. FIG. 4B shows expression of transmembrane IL17RA after 1.7 mM ex vivo, gel-based, topical treatment of human skin equivalents stimulated to an atopic dermatitis-like phenotype. The gel-based topical treatment consists of the ingredients listed in Table 3.

[0125] FIGS. 5A-5B show that SNAs designed to induce exon skipping of REST are more potent than linear oligonucleotides. FIG. 5A shows the ratio of gene expression of full-length to exon 3-deficient transcript (quantified with qPCR) after 48 hours in vitro treatment of MEFs at 5 μM, FIG. 5B shows the endpoint PCR readout of corresponding samples showing production of exon 3-skipped, not naturally occurring transcript.

[0126] FIGS. 6A-6C show that SNAs designed to induce exon skipping of IL1RAP are more potent as SNAs than linear splice-switching oligonucleotides (SSOs) and more potent in co-delivery in SNA form. Ratio of transmembrane to total IL1RAP after 48 hours in vitro treatment of HFKs shown. FIG. 6A and FIG. 6B show that SNA form is superior to linear for oligonucleotide 1, 2 (IC₅₀ of 11.1, 4.4 μM for SNA 1, 2; cannot be determined for linear). FIG. 6C shows co-delivery of I and 2 in SNA form is superior to the linear combination (IC₅₀ 0.36 μM for bispecific SNA vs. 200 μM for linear) and to monospecific SNA1 or SNA2. 4PL logistic fit was used for IC₅₀ calculations.

[0127] FIG. 7 shows that SNAs designed to induce exon skipping of IL1RAP are more potent as SNAs than linear splice-switching oligonucleotides (SSOs) and more potent in co-delivery in SNA form. Endpoint PCR data showing appearance of soluble isoform following IL1 RAP SNA treatment.

[0128] FIG. 8 shows that SNAs comprised of a fully 2′-methoxyethyl (MOE) modified oligonucleotide reduce total STAT3 levels, indicating production of an out-of-frame transcript that undergoes nonsense-mediated decay. Gene expression of STAT3 (quantified with qPCR) after 72 hours treatment of Δ549s is shown.

[0129] FIGS. 9A-9C show that SNAs designed to induce exon inclusion of SMN2 are more potent when delivered in SNA form than as linear oligonucleotides. FIG. 9A shows that SNAs are 16-fold more potent at reducing del7 SMN2 transcript (IC50 1.8 and 19.2 μM, respectively) and FIG. 9B shows that SNAs are more potent at increasing full-length SMN2 transcript (EC₅₀ of 0.8 μM for SNA; linear could not be determined. FIG. 9C shows that neither linear nor SNA effected total SMN2 transcript. Patient fibroblasts were treated and a 4PL, 3PL logistic fit was used for IC₅₀ calculations, EC₅₀ calculations.

[0130] FIGS. 10A-10B show Kaplan-Meier survival plots of SMA mice treated with a single intracerebro-ventricular (ICV) injection of SNA-ASO or linear ASO at 10, 20 or 30 μg doses at age P0 (post-natal day 0). Linear represents linear ASO and SNA represents SNA-ASO. FIG. 10A shows Δ7SMA mice treated with the 30 μg dose Nusinersen-SNA had increased survival to a maximum of 82 days while scramble SNA has no effect on survival. FIG. 10B shows that linear Nusinersen improved survival of Δ7 SMA mice to a maximum of 28 days.

[0131] FIGS. 11A-11B show increase in body weight of SMA mice treated with a single ICV injection of SNA-ASO at 10, 20 or 30 μg or linear ASO at 10 or 20 μg doses. Mice in 30 μg SNA-ASO group have not reached end point. Linear represents linear ASO and SNA represents SNA-ASO. FIG. 11A shows that weights are similar in Δ7SMA mice treated with linear or Nusinersen-SNA treated mice. FIG. 11B shows that weights are similar in Δ7SMA mice treated with morpholino to ISS-N1 or Nusinersen-SNA.

[0132] FIG. 12 shows a bar graph depicting increased exon 7 incorporation in SMN2 mRNA transcript in SMA mice treated with SNA-ASO (30 μg single dose on P0) compared with untreated mice on P10. SNA ISS-N1 represents SNA-ASO.

[0133] FIG. 13 shows distribution of linear ASO and SNA ASO in the whole brain over 7 day period following single intrathecal administration in lower lumbar region of SD rat. ID=injected dose.

[0134] FIG. 14 shows ¹²⁵I-ASO distribution in Sprague Dawley rats.

[0135] FIG. 15 shows ¹²⁵I-ASO concentration in kidneys (% ID/g).

[0136] FIG. 16 shows ¹²⁵I-ASO group mean for all brain regions in % ID/g.

[0137] FIG. 17 shows ¹²⁵I-ASO concentration in the olefactory region (% ID/g).

[0138] FIG. 18 shows ¹²⁵I-ASO concentration in the whole brain (% ID/g).

[0139] FIG. 19 shows ¹²⁵I-ASO concentration in the ventricles (% ID/g).

[0140] FIG. 20 shows ¹²⁵I-ASO concentration in whole blood and plasma at 168h.

[0141] FIG. 21 shows ¹²⁵I-ASO concentration in the spleen (% ID/g).

[0142] FIG. 22 shows ¹²⁵I-ASO concentration in the liver (% ID/g).

[0143] FIG. 23 shows ¹²⁵I-ASO concentration in the thyroid (% ID/g).

[0144] FIG. 24 shows ¹²⁵I-ASO in superficial cervical lymph nodes (% ID/g).

[0145] FIG. 25 shows ¹²⁵I-ASO in deep cervical lymph nodes (% ID/g).

[0146] FIG. 26 shows ¹²⁵I-ASO concentration in the CSF and thoracic region (% ID/g).

[0147] FIG. 27 shows ¹²⁵I-ASO in lumbar CSF (% ID/g).

[0148] FIG. 28 shows ¹²⁵I-ASO in cervical CSF (% ID/g).

[0149] FIG. 29 shows ¹²⁵I-ASO concentration in the septal area (% ID/g).

[0150] FIGS. 30A-30B are a table showing the average percent injected dose per gram of tissue over 7 days for various organs and regions of brain and spinal cord in rats. The top third of the table shows the values for linear ASO, middle third for SNA ASO and bottom third shows the ratio of SNA ASO to linear ASO.

[0151] FIGS. 31A-31B show quantification of full-length and Δ7 variants of SMN2 mRNA transcripts in SMA patient fibroblasts after treatment with liposomal or gold SNAs. Fold changes in SMN2 mRNA levels were calculated relative to the untreated fibroblasts. Lipidated oligonucleotides were also tested alone without being functionalized on a SNA core. FIG. 31A shows Liposomal vs Gold SNA; Full-length SMN2 mRNA and FIG. 31B shows Liposomal vs Gold SNA; Δ7 SMN2 mRNA.

[0152] FIG. 32 shows SPECT/CT images 168 hours post-intrathecal administration of ¹²⁵I-ASOs in rats. Subject 4001 will be excluded from quantitative analysis as the injection appears to be in the epidural space.

[0153] FIG. 33 shows SPECT/CT images of IT injection of ¹²⁵I-ASOs in rat at 6 and 168 hours.

[0154] FIGS. 34A-34B show decay-corrected SPECT/CT images of intrathecally administered ASO for ¹²⁵I-ASO linear in subject 4001 across timepoints. This subject will be excluded from quantitative analysis as the injection appears to be in the epidural space.

[0155] FIGS. 35A-35B show decay-corrected SPECT/CT images of intrathecally administered ASO for ¹²⁵I-ASO linear in subject 4002 across timepoints.

[0156] FIGS. 36A-36B show decay-corrected SPECT/CT images of intrathecally administered ASO for ¹²⁵I-ASO linear in subject 4007 across timepoints.

[0157] FIGS. 37A-37B show decay-corrected SPECT/CT images of intrathecally administered ASO for ¹²⁵I-ASO SNA in subject 4006 across timepoints. Distribution and persistence of SNA-ASO in SD rats after single bolus, intrathecal administration. The SNA-ASO contains iodine-125 radioactive label and is visualized using whole body SPECT/CT imaging. After administration in the lower lumbar region, the SNA-ASO distributes through the spinal cord (H0.0) and parts of the brain (H0.25 through H0.75). Compared with linear ASO, the signal intensity is lower for SNA-ASO at H0.75 but rises to comparable levels by 6 hours. Unlike with linear ASO, clearance through the kidneys is not detectable at any time point during the 7-day monitoring period. Also unlike linear ASO, by day 7, high amount of SNA-ASO is still present in the brain.

[0158] FIGS. 38A-38B show decay-corrected SPECT/CT images of intrathecally administered ASO for ¹²⁵I-ASO SNA in subject 4004 across timepoints.

[0159] FIGS. 39A-39B show decay-corrected SPECT/CT images of intrathecally administered ASO for ¹²⁵I-ASO SNA in subject 4005 across timepoints.

[0160] FIGS. 40A-40B show distribution and persistence of linear ASO in SD rats after single bolus, intrathecal administration. The linear ASO contains iodine-125 radioactive label and is visualized using whole body SPECT/CT imaging. Shortly after administration in the lower lumbar region, the oligonucleotide distributes through the spinal cord (H0.0) and parts of the brain (H0.25 through H0.75). Beginning at 6-hours after administration, the clearance through kidney is clearly visible (H6). Kidneys are much easier to visual at 24 hours due to high level of clearance (H24). By day 7, majority of the oligonucleotide has cleared out of the CNS. Only limited punctate pattern remains throughout CNS indicating low amount of oligonucleotide.

[0161] FIG. 41 shows an ROI analysis key.

[0162] FIG. 42 shows IT injection of ¹²⁵I-ASOs in rat in SPECT/CT images at 6 and 168h.

### DETAILED DESCRIPTION

[0163] This invention is not limited in its application to the details of construction and the arrangement of components set forth in the following description or illustrated in the drawings. The invention is capable of other embodiments and of being practiced or of being carried out in various ways. Also, the phraseology and terminology used herein is for the purpose of description and should not be regarded as limiting. The use of “including,” “comprising,” or “having,” “containing,” “involving.” and variations thereof herein, is meant to encompass the items listed thereafter and equivalents thereof as well as additional items.

[0164] Genetic diseases and disorders are often associated with genetic abnormalities and splicing errors. The modulation of splicing using antisense oligonucleotides provides an attractive therapeutic option for tailored interventions in diseases or disorders associated with abnormalities in splicing of pre-mRNA, such as genetic diseases or disorders.

[0165] It has been discovered, quite unexpectedly, that compounds referred to as antisense oligonucleotides which function in modulating splicing described herein are more potent when arranged in a spherical nucleic acid (SNA) format. It was discovered that these splice modulating antisense oligonucleotides are more active in a SNA relative to the same linear antisense oligonucleotides. This unexpected finding, demonstrated herein, shows that splice modulating antisense oligonucleotides comprised of a variety of lipid-containing cores or other cores, oligonucleotide sequences, oligonucleotide lengths, and oligonucleotide densities are capable of enhancing the expression of corrected mRNA variants containing a desired sequence, in some embodiments, for expression of functional protein.

[0166] In a non-limiting and exemplary embodiment, the data presented herein show that having the antisense oligonucleotide in a SNA enhanced the inclusion of an exon normally excluded from the survival motor neuron (SMN) 2 gene in the genetic disorder spinal muscular atrophy (SMA). SMA is an autosomal recessive neurodegenerative disorder characterized by progressive muscle wasting and loss of muscle function due to severe motor neuron dysfunction. SMA is caused by low levels of survival of motor neuron (SMN) due to deletion or loss of function of SMN I gene. It was found, unexpectedly, that linear antisense oligonucleotides which lack the oligonucleotide shell do not show similar activity (FIGS. 1A-1B). The results suggest that antisense oligonucleotide SNAs are uniquely able to achieve the desired inclusion of exon 7 in the SMN2 gene and ultimately lead to increased expression of SMN protein for the treatment of SMA. In some embodiments, a SNA disclosed herein modulates splicing for the production of a mRNA transcript variant targeted for nonsense mediated decay (NMD). In some embodiments, such mRNA transcript variant is produced for the treatment of a disease or disorder disclosed herein. In a non-limiting embodiment, the disease or disorder is cancer.

[0167] Also, unexpectedly, the antisense oligonucleotides disclosed herein have a different distribution and persistence compared to the corresponding linear or free antisense oligonucleotides in vivo. Exemplary antisense oligonucleotides in the SNA disclosed herein are distributed away from the site of administration relatively slowly and are maintained in the target region/organ for a time longer than the corresponding linear or free antisense oligonucleotide. Furthermore, less antisense oligonucleotide in the SNA is observed in the kidneys which, without wishing to be bound by theory, likely indicates a relatively slow clearance rate from the CNS. The slower clearance and accumulation in the kidneys of antisense oligonucleotide in a SNA relative to linear or free antisense oligonucleotide could also result in lower renal toxicity. Overall, disclosed herein is that antisense oligonucleotides in a SNA persist in the CNS longer and at higher levels compared to the corresponding free or linear antisense oligonucleotides.

[0168] Furthermore, in non-limiting aspects of the disclosure, the data presented herein show that having the splice modulating antisense oligonucleotides in a SNA enhanced the inclusion of an exon normally excluded from the SMN2 gene in spinal muscular atrophy (SMA); that the splice modulating antisense oligonucleotides in a SNA enhance switching of a transmembrane receptor to a soluble variant of the transmembrane receptor (e.g., transmembrane receptor involved in inflammation) via exon skipping, which provides a mechanism for treating diseases and disorders associated with increased transmembrane receptor expression or activation; that two or more different oligonucleotides can mediate a desired effect, and in some instances can produce a synergistic or additive effect; that the antisense oligonucleotides disclosed herein decrease expression of certain splice variants via nonsense-mediated decay, which has potential for treating diseases and disorders associated with overexpression of proteins, such as anti-cancer therapies; that the antisense oligonucleotide in a SNA also persists in the CNS longer and at higher levels compared to the corresponding free or linear antisense oligonucleotide; and that the antisense oligonucleotides in a SNA have decreased renal accumulation which results in reduced renal toxicity compared to the corresponding free or linear antisense oligonucleotide. Linear splice modulating antisense oligonucleotides which lack the oligonucleotide shell do not show similar activity. The results suggest that antisense oligonucleotide SNAs are uniquely able to achieve the desired splice modulation to modulate the levels of expression of a mRNA of interest for the expression of a protein of interest. In a non-limiting example, a SNA disclosed herein achieves increased inclusion of exon 7 in the SMN2 gene and ultimately lead to increased expression of SMN protein for the treatment of SMA.

[0169] Further, in vivo data (described in the Examples) has demonstrated that the splice modulating oligonucleotide SNA (also referred to as Nusinersen-SNA or Spinraza-SNA) exhibits significantly improved therapeutic properties as compared with the linear oligonucleotide (nusinersen) in a mouse model of SMA. Because nusinersen is clinically administered to the CSF, the constructs were delivered to the CSF via intracerebral ventricular (lCV) injection in post-natal day 0 (P0) mice. Mice treated with 20 μg of nusinersen had a median survival of 17 days, compared to 14 days in untreated mice. In contrast, 10 μg of nusinersen-SNA increased median survival to 26 days whereas 20 μg increased survival to 69 days. Increasing the nusinersen dose to 30 μg resulted in toxicity and a median survival of 2 days. Thus, nusinersen-SNA treatment resulted in substantially increased median survival over nusinersen at the same dose. Unlike Nusinersen and quite unexpectedly, administration of nusinersen-SNA by ICV injection to the CSF at 30 μg dose did not lead to acute toxicity. In vitro and in vivo, nusinersen-SNA treatment elicited more full length SMN mRNA compared to nusinersen. Given that SNAs improve the efficacy and safety of nusinersen in the central nervous system (CNS), the SNAs of the invention may improve the therapeutic window of existing splice modulating oligonucleotides and thus, may be used as novel therapies for CNS diseases and disorders, such as those disclosed herein. SNAs may also provide an opportunity for the delivery of therapeutics, such as free or linear oligonucleotides, which are cleared relatively quickly from the body and/or cause renal toxicity. In some embodiments, a SNA disclosed herein costs reduced renal toxicity in a subject compared to the corresponding linear or free oligonucleotide.

[0170] The data show that the SNAs disclosed herein demonstrated increased survival and decreased toxicity in a translationally-relevant SNA mouse model. In brief, the data demonstrated prolonged survival by four-fold (maximal survival of 115 days compared to 28 days for nusinersen-treated mice), doubled the levels of healthy full-length SMN2 mRNA and protein in SMA patient fibroblasts when compared to nusinersen, doubled the quantity of healthy full-length SMN mRNA levels in spinal cord tissue compared to untreated mice and mitigated toxicity of nusinersen at the highest dose tested in mice.

[0171] Overall, the present application demonstrates the potential of SNAs to be transformative therapies for diseases including inflammatory conditions, cancer and rare neurological and ophthalmological disorders.

[0172] SNA are three-dimensional arrangements of nucleic acids, with densely packed and radially arranged oligonucleotides on a central nanoparticle core. In its simplest form the SNA is composed of oligonucleotides and a core. The core may be a hollow core which is produced by a 3-dminensional arrangement of molecules which form the outer boundary of the core. For instance, the molecules may be in the form of a lipid layer or bilayer which has a hollow center. Alternatively, the molecules may be in the form of lipids, such as amphipathic lipids, i.e., sterols which are linked to an end the oligonucleotide. Sterols such as cholesterol linked to an end of an oligonucleotide may associate with one another and form the outer edge of a hollow core with the oligonucleotides radiating outward from the core. The core may also be a solid or semi-solid core.

[0173] In some embodiments, the core comprises or consists of a metal core. In some embodiments, the core is an inorganic metal core. Non-limiting examples of a metal core include gold, silver, platinum, aluminum, palladium, copper, cobalt, indium, nickel and mixtures thereof. In some embodiments, the core comprises or consists of gold. In some embodiments, a SNA disclosed herein is degradable. In some embodiments, the core is a solid core. In some embodiments, the core is a hollow core. In some embodiments, a SNA or core disclosed herein comprises a semiconductor or magnetic material. In some embodiments, the core is a liposomal core.

[0174] In some embodiments, an oligonucleotide disclosed herein is attached to the core through a covalent interaction (e.g., thiol-gold interaction). In some embodiments, an oligonucleotide disclosed herein is attached to the core through a non-covalent interaction (e.g., van der Waals interaction, ionic interaction or electrostatic interaction). In some embodiments, an oligonucleotide disclosed herein is uniformly dispersed or suspended around a core, such as a liposomal core or a gold core. In some embodiments, the oligonucleotide is not uniformly dispersed or suspended around a core, such as a liposomal core or gold core. In some embodiments, the non-covalent interaction is reversible.

[0175] The oligonucleotides are associated with the core. An oligonucleotide that is associated with the core may be covalently linked to the core or non-covalently linked to the core, i.e., potentially through hydrophobic interactions. For instance, when a sterol forms the outer edge of the core an oligonucleotide may be covalently linked to the sterol directly or indirectly. When a lipid layer forms the core, the oligonucleotide may be covalently linked to the lipid or may be non-covalently linked to the lipids e.g., by interactions with the oligonucleotide or a molecule such as a cholesterol attached to the oligonucleotide directly or indirectly through a linker or linker moiety.

[0176] SNAs are taken up by cells to a greater extent than the same oligonucleotides that are not in the SNA. Nontoxic, biocompatible, and biodegradable lipid-containing SNAs that are useful for treating diseases and disorders, such as diseases and disorders related or associated with an abnormality in splice modulation, are disclosed herein. Antisense technology is an effective means for modulating the expression of one or more specific gene products, including alternative splice products, and is uniquely useful in a number of therapeutic, diagnostic, and research applications. The principle behind antisense technology is that an antisense compound, which hybridizes to a target nucleic acid, modulates gene expression activities such as transcription, splicing or translation through one of a number of antisense mechanisms. The sequence specificity of antisense compounds makes them extremely attractive as tools for target validation and gene functionalization, as well as therapeutics to selectively modulate the expression of genes involved in disease and disorders.

[0177] As used herein, “antisense activity” refers to any detectable and/or measurable change attributable to the hybridization of an antisense compound to its target nucleic acid. In some embodiments, antisense activity is a decrease in the amount or expression of a target nucleic acid or protein encoded by such target nucleic acid compared to target nucleic acid levels or target protein levels in the absence of the antisense compound. In some embodiments, antisense activity is an increase in the amount or expression of a target nucleic acid or protein encoded by such target nucleic acid compared to target nucleic acid levels or target protein levels in the absence of the antisense compound.

[0178] As used herein, “antisense compound” refers to a compound comprising a splice modulating antisense oligonucleotide in a spherical nucleic acid (SNA). The terms “antisense compound” or “oligonucleotide” or “splice modulating compound” or are used interchangeably to refer to a splice modulating oligonucleotide. As used herein, “antisense oligonucleotide” refers to an oligonucleotide having a nucleobase sequence that is at least partially complementary to a target nucleic acid. In some embodiments, the antisense oligonucleotide contains one or more additional features, or one or more additional modifications.

[0179] Splice modulating oligonucleotides direct pre-mRNA splicing by binding sequence elements and blocking access to the transcript by the spliceosome and other splicing factors. They can be applied to (1) restore correct splicing of an aberrantly spliced transcript, (2) produce a novel splice variant that is not normally expressed, or (3) manipulate alternative splicing from one splice variant to another. Through the latter mechanism, splice-switching oligonucleotides may therefore downregulate a deleterious transcript while simultaneously upregulating expression of a preferred transcript. Notably, their activity is enhanced with increased target gene expression because this enables increased production of the preferred splice variant. This is in contrast to traditional anti-sense approaches and small-interfering RNA, which exhibit decreased potency with increased target gene expression.

[0180] In some embodiments, an antisense oligonucleotide refers to a splice modulating antisense oligonucleotide that comprises or consists of the nucleic acid sequence of SEQ ID NO: 1 below.

(SEQ ID NO: 1)
5′ - TCA CTT TCA TAA TGC TGG - (Spacer 18)₂ -
3CholTEG.

[0181] In some embodiments, a SNA described herein comprises an oligonucleotide that is 50% to 100% identical to the nucleic acid sequence of SEQ ID NO: 1. In some embodiments, a SNA described herein comprises an oligonucleotide that is 50% identical, 55% identical, 60% identical, 65% identical, 70% identical, 75% identical, 80% identical, 85% identical, 86% identical, 87% identical, 88% identical, 89% identical, 90% identical, 91% identical, 92% identical, 93% identical, 94% identical, 95% identical, 96% identical, 97% identical, 98% identical, 99% identical, 99.5% identical, or 100% identical to the nucleic acid sequence of SEQ ID NO: 1.

[0182] In some embodiments, the antisense oligonucleotide refers to the nucleic acid sequence of ISIS 396443. As used herein, “ISIS 396443” refers to an oligonucleotide having the following structure:

(SEQ ID NO: 16)
Tes ^{m}Ces Aes ^{m}Ces Tes Tes Tes ^{m}Ces Aes Tes Aes Aes
Tes Ges ^{m}Ces Tes Ges Ge,

wherein “^{m}C” indicates 5-methyl cytidine; “e” indicates a 2′-MOE modification; “C” indicates cytidine, “T” indicates thymidine. “A” indicates adenosine, “G” indicates guanosine, and “s” indicates phosphorothioate linkage. Isis 396443 is also referred to in the art as Nusinersen, which is the International Nonproprietary Name (INN), Ionis-SMNRx, and as BIIB058. As used herein, “MOE” refers to methoxyethyl. “2′-MOE” means a —OCH₂CH₂OCH₃ group at the 2′ position of a furanosyl ring.

[0183] In some embodiments, a SNA described herein comprises an oligonucleotide that is 50% to 100% identical to the nucleic acid sequence of SEQ ID NO: 16. In some embodiments, a SNA described herein comprises an oligonucleotide that is 50% identical, 55% identical, 60% identical, 65% identical, 70% identical, 75% identical, 80% identical, 85% identical, 86% identical, 87% identical, 88% identical, 89% identical, 90% identical, 91% identical, 92% identical, 93% identical, 94% identical, 95% identical, 96% identical, 97% identical, 98% identical, 99% identical, 99.5% identical, or 100% identical to the nucleic acid sequence of SEQ ID NO: 16.

[0184] In some embodiments, the antisense oligonucleotide refers to an antisense oligonucleotide that comprises or consists of the nucleic acid sequence of SEQ ID NO: 17 below.

(SEQ ID NO: 17)
5′-CUA UAU AUA GAU AGU UAU UCA ACA AA-3′.

[0185] The following oligos were modified at every base with Morpholino chemistry groups:

(SEQ ID NO: 17)
EIMO-ASO (26-mer)
5’ CUA UAU AUA GAU AGU UAU UCA ACA AA 3’.

[0186] In some embodiments, a SNA described herein comprises an oligonucleotide that is 50% to 100% identical to the nucleic acid sequence of SEQ ID NO: 17. In some embodiments, a SNA described herein comprises an oligonucleotide that is 50% identical, 55% identical, 60% identical, 65% identical, 70% identical, 75% identical, 80% identical, 85% identical, 86% identical, 87% identical, 88% identical, 89% identical, 90% identical, 91% identical, 92% identical, 93% identical, 94% identical, 95% identical, 96% identical, 97% identical, 98% identical, 99% identical, 99.5% identical, or 100% identical to the nucleic acid sequence of SEQ ID NO: 17.

[0187] In some embodiments, each base of the antisense oligonucleotide of SEQ ID NO: 17 is modified with morpholino chemistry groups. A “morpholino oligomer” or “PMO” refers to an oligonucleotide having a backbone which supports a nucleobase capable of hydrogen bonding to typical polynucleotides, wherein the polymer lacks a pentose Sugar backbone moiety, but instead contains a morpholino ring. An exemplary “morpholino oligomer comprises morpholino subunit structures linked together by phosphoramidate or phosphorodiamidate linkages, joining the morpholino nitrogen of one subunit to the 4′ exocyclic carbon of an adjacent subunit, each subunit comprising a purine or pyrimidine nucleobase effective to bind, by base-specific hydrogen bonding, to a base in a polynucleotide. Morpholino oligomers (including antisense oligomers) are detailed, for example, in U.S. Pat. Nos. 5,698,685; 5,217,866; 5,142,047; 5,034,506; 5,166,315; 5,185,444; 5,521,063; 5,506,337 and pending U.S. patent application Ser. Nos. 12/271,036; 12/271,040; and PCT publication number WO/2009/064471 all of which are incorporated herein by reference in their entirety.

[0188] In some embodiments, each base of the antisense oligonucleotide of SEQ ID NO: 17 is modified with locked nucleic acid (LNA), in which the 2′-hydroxyl group of the RNA is linked to the 4′ carbon atom of the sugar ring, thereby forming a bicyclic sugar moiety. The linkage is in certain aspects is a methylene (—CH2-)n group bridging the 2 oxygen atom and the 4′ carbon atom wherein n is 1, 2 or 3. LNAs and preparation thereof are described in WO 98/39352 and WO 99/14226. In some embodiments, the antisense oligonucleotide has locked nucleic acid (LNA) modifications. In some embodiments, less than all of the nucleotides in the antisense oligonucleotide include a LNA modification. In some embodiments, all of the nucleotides in the antisense oligonucleotide include a LNA modification. In some embodiments, the antisense oligonucleotide has morpholino modifications. In some embodiments, less than all of the nucleotides in the antisense oligonucleotide include a morpholino modification. In some embodiments, all of the nucleotides in the antisense oligonucleotide include a morpholino modification.

[0189] In other embodiments, each base of the antisense oligonucleotide of SEQ ID NO:17 is a peptide nucleic acid (PNA). In PNA compounds, the sugar-backbone of an oligonucleotide is replaced with an amide containing backbone. See, for example U.S. Pat. Nos. 5,539,082; 5,714,331; and 5,719,262, and Nielsen et al., Science, 1991, 254, 1497-1500, the disclosures of which are herein incorporated by reference.

[0190] In some embodiments, the present invention provides antisense compounds, which comprise or consist of an oligomeric compound comprising a splice modulating antisense oligonucleotide, having a nucleobase sequences complementary to that of a target nucleic acid.

[0191] In some embodiments, an antisense oligonucleotide described herein is used for the treatment of a disease or disorder, such as a genetic disorder, associated with abnormalities in splice modulation.

[0192] Splice-switching oligonucleotides direct pre-mRNA splicing by binding sequence elements and blocking access to the transcript by the spliceosome and other splicing factors. They can be applied to (1) restore correct splicing of an aberrantly spliced transcript, (2) produce a novel splice variant that is not normally expressed, or (3) manipulate alternative splicing from one splice variant to another. Through the latter mechanism, splice-switching oligonucleotides may therefore downregulate a deleterious transcript while simultaneously upregulating expression of a preferred transcript. Notably, their activity is enhanced with increased target gene expression because this enables increased production of the preferred splice variant. This is in contrast to traditional anti-sense approaches and small-interfering RNA, which exhibit decreased potency with increased target gene expression.

[0193] Non-limiting examples of gene targets and diseases or disorders amenable to splice modulation are listed in Table 1.

TABLE 1
Disease/Target Combinations Amenable to Splice Modulation

| Target | Indication, Disease or | NCBI NG_ | NCBI NM_ |
|---|---|---|---|
| | Disorder | (genome) | (mRNA) |
| IL-1RAP | Various pro- | NG_029105.1 | NM_001167928.1 |
| | inflammatory diseases | | |
| STAT3 | Cancer | NG_007370.1 | NM_003150.3 |

[0194] In some embodiments, the pre-mRNA of interest is obtained or derived from the genomic sequence of a target of interest or a gene of interest. For instance, the pre-mRNA listed in Table 1 is obtained or derived by transcribing the genomic sequence provided by an NCBI ID.

[0195] In some embodiments, the pre-mRNA of interest is obtained from the genomic sequence of interleukin 17 receptor A (IL17RA), RE1 Silencing Transcription Factor (REST), IL1 receptor accessory protein (IL1RAP), or signal transducer and activator of transcription 3 (STAT3). The nucleic acid and amino acid sequences of genes, mRNA and protein variants of IL17RA, REST, IL1RAP, and STAT3 are provided in Table 13.

[0196] According to some aspects, methods of producing a splice variant susceptible to nonsense-mediated decay are contemplated herein. In some embodiments, the method comprises contacting a cell with a SNA comprising oligonucleotides arranged in an oligonucleotide shell and a core in an affective amount to produce a splice variant susceptible to nonsense-mediated decay (NMD). According to some aspects, methods of treating a disease or disorder in a subject are contemplated herein. In some embodiments, the method comprises administering to a subject an effective amount of a SNA comprising oligonucleotides arranged in an oligonucleotide shell and a core to produce a splice variant susceptible to NMD in order to treat the disease or disorder disclosed herein in the subject. In some embodiments, the method comprises modulating splicing of a pre-mRNA of interest to produce a splice variant susceptible to NMD in order to reduce the levels of a protein of interest in a subject with a disease or disorder disclosed herein, such as cancer, in order to treat the disease or disorder, relative to a baseline (e.g., relative to the levels of the protein of interest in a subject who does not have the disease, relative to the levels of the protein of interest in a subject who has the disease and has not been administered the SNA, or relative to the levels of the protein of interest in a subject who has the disease and has been administered the corresponding linear oligonucleotide not in an SNA).

[0197] NMD is a mRNA quality control mechanism in eukaryotes to downregulate premature termination codons (PTC)-containing mRNAs generated by cells through errors made during gene expression and that also naturally exist or are generated as part of autoregulatory mechanisms to maintain cellular homeostasis. Although many cellular NMD targets are derived from aberrant pre-mRNA splicing and, possibly, transcription initiation, NMD also targets ˜10% of normal physiological mRNAs so as to promote an appropriate cellular response to changing environmental milieus, including those that induce apoptosis, maturation or differentiation. NMD selectively degrades mRNAs harboring PTCs to prevent the production of truncated proteins that could result in disease, such as dominantly inherited diseases due to PTC-containing mRNAs that escape NMD or to regulate the abundance of a large number of cellular RNAs. The central role of NMD in the control of gene expression requires the existence of buffering mechanisms that tightly regulate the magnitude of this pathway. A SNA disclosed herein can be used to modulate splicing such that a mRNA of interest including a PTC is produced and is degraded via NMD. (See e.g., Hug et al., Nucleic Acids Res (2016): 44(4): 1483-95, which is incorporated by reference herein in its entirety). The use of NMD can be used to treat a disease or disorder disclosed herein, such as cancer.

[0198] In some embodiments, a SNA disclosed herein induces the production of a mRNA harboring a PTC situated approximately 50-55 nucleotides or more than ˜50-55 nucleotides upstream of an exon-exon junction. (See e.g., Nagy E. et al. (1998) Trends Biochem. Sci 23:198-9). In this is the production of an mRNA harboring a PTC situated approximately at or more than 40, 41, 42, 43, 44, 45, 46, 47, 48, 49, 50, 51, 52, 53, 54, 55, 56, 57, 58, 59, 60, 61, 62, 63, 64, 65, 66, 67, 68, 69, 70, 75, 80, 85, 90, 95, 100, 110, 120, 130, 140, 150, 200, 250, 300, 350, 400, 450, 500, 550, 600, 650, 700, 750, 800, 850, 900, 950, 1000 nucleotides upstream of an exon-exon junction, or any ranges or combinations thereof. In some embodiments, a SNA disclosed herein for inducing an NMD to treat the disease or disorder disclosed herein includes an ‘EJC’ mark, which is deposited ˜20-24 nucleotides upstream of ˜80% of exon-exon junctions. EJCs consist of four core components; eukaryotic translation initiation factor 4Δ3 (eIF4Δ3), cancer susceptibility candidate 3 (CASC3), RNA-binding motif protein 8A (RBM8A or Y14), and either mago-nashi homolog (MAGOH) or MAGOHB. (See e.g., Le Hir et al. EMBO J. (2000) 19(24):6860-9; Le Hir et al. EMBO J. (2001) 20(17):4987-97; Saulière et al. (2012) Nat Struct Mol Biol 19(11):1124-31; Singh et al. Cell (2012) 151(4):750-64, the contents of which are incorporated herein by reference in their entireties).

[0199] Various Pro-Inflammatory Diseases (IL-1RAP)

[0200] Several inflammatory diseases, such as rheumatoid arthritis (RA) and dermatitis, are associated with an excessive concentration of interleukin-1 (IL-1) in the plasma. IL-1 is an important mediator controlling local and systemic effects on a wide variety of target cells, there by regulating immunity and inflammation. It is believed to mediate inflammation by recruitment of neutrophils, activation of macrophages and stimulation of T and B cells. IL-1 binds to IL-1 receptor type 1 (IL-1RI), which results in the recruitment of the IL-1 receptor accessory protein (IL-1RAcP).

[0201] sIL-1RAcP can be produced by modulating IL-1RAcP splicing using antisense oligonucleotide-mediated exon skipping. The SNA constructs comprising a IL-1RAcP splice modulating antisense oligonucleotide is disclosed herein. For instance, SNAs can be used to mediate skipping of exon 9 to induce the production of a novel form of sIL-1RAcP.

[0202] Interleukin 17A Receptor (IL17RA)

[0203] Interleukin 17A (IL17A) is a proinflammatory cytokine secreted by activated T-lymphocytes. It is a potent inducer of the maturation of CD34-positive hematopoietic precursors into neutrophils. The transmembrane protein encoded by the gene interleukin 17A receptor (IL17RA; also referred to as CDw217, IL17R, Interleukin 17 Receptor, CD217 Antigen, HIL-17R, CANDF5, CD217, IMD51) is a ubiquitous type I membrane glycoprotein that binds with low affinity to interleukin 17A.

[0204] Interleukin 17A and its receptor play a pathogenic role in many inflammatory and autoimmune diseases such as rheumatoid arthritis. Like other cytokine receptors, this receptor likely has a multimeric structure. Alternative splicing results in multiple transcript variants encoding different isoforms.

[0205] Transcript variant 2 (SEQ ID NO: 93) lacks an alternate in-frame exon in the coding region, compared to variant 1. It encodes a soluble isoform, isoform 2 which is shorter and lacks a transmembrane region, when compared to isoform 1. The nucleotide sequence of SEQ ID NO: 93 includes the genomic, coding sequence and amino acid sequences of the two isoforms of IL17RA produced by alternative splicing.

[0206] Abnormalities in IL17RA are associated with diseases and disorders, such as immunodeficiency 51 (IMD51). The disease is caused by mutations in the gene. IMD51 is a primary immunodeficiency disorder with altered immune responses and impaired clearance of fungal infections, selective against Candida. It is characterized by persistent and/or recurrent infections of the skin, nails and mucous membranes caused by organisms of the genus Candida, mainly Candida albicans. (See e.g., Puel et al. (Science (2011) 332(6025):65-8. doi: 10.1126/science.1200439. Epub 2011 Feb. 24).

[0207] In some embodiments, the treatment of a disease or disorder is associated with increased IL17RA expression or activation. In some embodiments, a SNA disclosed herein is used to treat the disease or disorder associated with increased IL17RA expression or activation. In some embodiments, a SNA disclosed herein promotes exclusion of an exon in IL17RA that expresses a transmembrane region or domain in IL17RA to produce a soluble IL17RA, which is not anchored to the cell membrane. In some embodiments, the souble IL17RA variant corresponds to IL17RA isoform 2 precursor (NCBI Ref. Seq.: NP_001276834.1; UniProtKB: Q96F46-2, whose amino acid sequence is disclosed in SEQ ID NO: 93) In some embodiments, the disease or disorder is a cancer or inflammatory disorder disclosed herein, which is associated with increased IL17RA expression or activity, to be treated with a SNA disclosed herein. In some embodiments, a SNA disclosed herein decreases the ratio of a transmembrane receptor disclosed herein to a soluble variant of the receptor. (See. e.g., Gaffen et al. Nat Rev Inununol (2009) 9(8):556).

[0208] In some embodiments, the transmembrane receptor is IL1RAP or any of the IL1RAP variants disclosed herein.

[0209] According to some aspects, methods of treating a disease or disorder in a subject are contemplated herein. In some embodiments, the method comprises administering to a subject with a disease or disorder associated with abnormal transmembrane receptor activity or abnormal transmembrane receptor expression in a cell of the subject an effective amount of a spherical nucleic acid (SNA) to produce or increase the levels of a soluble variant of the transmembrane receptor in the subject relative to a subject with a disease or disorder associated with abnormal transmembrane receptor activity or abnormal transmembrane receptor expression who has not been administered a SNA or relative to a subject with a disease or disorder associated with abnormal transmembrane receptor activity or abnormal transmembrane receptor expression who has been administered a corresponding linear oligonucleotide that is not in a SNA, or relative to a baseline level in order to treat the disease or disorder in the subject.

[0210] In some embodiments, the total levels of the transmembrane receptor in the cell of the subject remains stable (not significantly changed according to statistical analysis known to one of ordinary skill in the art) or the total levels of the mRNA encoding the transmembrane receptor are not decreased through RNAse-H mediated degradation.

[0211] In some embodiments, other transmembrane receptors are also contemplated herein. Ion channel linked receptors have ion channels for anions and cations, and constitute a large family of multipass transmembrane proteins. They participate in rapid signaling events usually found in electrically active cells such as neurons. They are also called ligand-gated ion channels. Opening and closing of ion channels is controlled by neurotransmitters.

[0212] Enzyme-linked receptors are either enzymes themselves, or directly activate associated enzymes. These are typically single-pass transmembrane receptors, with the enzymatic component of the receptor kept intracellular. The majority of enzyme-linked receptors are, or associate with, protein kinases.

[0213] G protein-coupled receptors are integral membrane proteins that possess seven transmembrane helices. These receptors activate a G protein upon agonist binding, and the G-protein mediates receptor effects on intracellular signaling pathways. A SNA disclosed herein can be used to produce a soluble variant of a transmembrane receptor belonging to the families of ion channel linked receptors, enzyme-linked receptors and/or G protein-coupled receptors.

[0214] According to some aspects, methods of increasing the levels of a mRNA of interest in a cell are contemplated herein. In some embodiments, the method comprises contacting the cell with a SNA disclosed herein, wherein the levels of the mRNA of interest in the cell is increased relative to a cell that has not been contacted with the SNA or relative to a cell contacted with the corresponding linear oligonucleotide not in a SNA or relative to a baseline level.

[0215] According to some aspects, methods of inducing exon skipping in a pre-mRNA of interest in a cell are contemplated herein. In some embodiments, the method comprises contacting a cell with a SNA disclosed herein to induce exon skipping in a pre-mRNA of interest in the cell. In some embodiments, antisense oligonucleotide on a SNA induces exon skipping by binding to pre-mRNA at a site usually occupied by a regulatory splicing factor or at a site usually associated with splicing machinery. (See e.g., Bremer et al. Molecular Therapy—Nucleic Acids (2016) 5, e379); Ramsbottom et al. PNAS (2018) 115:12489-94; Wang et al. Nat Rev Genet (2007) 8(10):749-61, the contents of which are incorporated herein by reference in their entireties).

[0216] According to some aspects, methods of inducing exon inclusion in a pre-mRNA of interest in a cell are contemplated herein. In some embodiments, the method comprises contacting a cell with a SNA disclosed herein to induce exon inclusion in a pre-mRNA of interest in the cell. In some embodiments, antisense oligonucleotide on a SNA induces exon skipping by binding to pre-mRNA at a site usually occupied by a regulatory splicing factor or at a site usually associated with splicing machinery.

[0217] In some embodiments, antisense compounds are single-stranded. Such single-stranded antisense compounds typically comprise or consist of an oligomeric compound that comprises or consists of a modified oligonucleotide and optionally a conjugate group. In some embodiments, antisense compounds are double-stranded. Such double-stranded antisense compounds comprise a first oligomeric compound having a region complementary to a target nucleic acid and a second oligomeric compound having a region complementary to the first oligomeric compound. The first oligomeric compound of such double stranded antisense compounds typically comprises or consists of a modified oligonucleotide and optionally a conjugate group. The oligonucleotide of the second oligomeric compound of such double-stranded antisense compound may be modified or unmodified. Either or both oligomeric compounds of a double-stranded antisense compound may comprise a conjugate group. The oligomeric compounds of double-stranded antisense compounds may include non-complementary overhanging nucleosides.

[0218] In some embodiments, oligomeric compounds of antisense compounds are capable of hybridizing to a target nucleic acid, resulting in at least one antisense activity. In some embodiments, antisense compounds selectively affect one or more target nucleic acid. Such selective antisense compounds comprises a nucleobase sequence that hybridizes to one or more target nucleic acid, resulting in one or more desired antisense activity and does not hybridize to one or more non-target nucleic acid or does not hybridize to one or more non-target nucleic acid in such a way that results in significant undesired antisense activity.

[0219] In some embodiments, hybridization of an antisense compound to a target nucleic acid results in alteration of processing, e.g., splicing, of the target precursor transcript. In some embodiments, hybridization of an antisense compound to a target precursor transcript results in inhibition of a binding interaction between the target nucleic acid and a protein or other nucleic acid. In certain such embodiments, hybridization of an antisense compound to a target precursor transcript results in alteration of translation of the target nucleic acid.

[0220] Antisense activities may be observed directly or indirectly. In some embodiments, observation or detection of an antisense activity involves observation or detection of a change in an amount of a target nucleic acid or protein encoded by such target nucleic acid, a change in the ratio of splice variants of a nucleic acid or protein, and/or a phenotypic change in a cell or animal.

[0221] In some embodiments, antisense compounds and/or oligomeric compounds comprise antisense oligonucleotides that are complementary to the target nucleic acid over the entire length of the oligonucleotide. In some embodiments, such oligonucleotides are 99% complementary to the target nucleic acid. In some embodiments, such oligonucleotides are 95% complementary to the target nucleic acid. In some embodiments, such oligonucleotides are 90% complementary to the target nucleic acid. In some embodiments, such oligonucleotides are 85% complementary to the target nucleic acid. In some embodiments, such oligonucleotides are 80% complementary to the target nucleic acid. In some embodiments, antisense oligonucleotides are at least 80% complementary to the target nucleic acid over the entire length of the oligonucleotide and comprise a region that is 100% or fully complementary to a target nucleic acid. In certain such embodiments, the region of full complementarity is from 6 to 20 nucleobases in length. In certain such embodiments, the region of full complementarity is from 10 to 18 nucleobases in length. In certain such embodiments, the region of full complementarity is from 18 to 20 nucleobases in length.

[0222] In some embodiments, oligomeric compounds and/or antisense compounds comprise one or more mismatched nucleobases relative to the target nucleic acid. In certain such embodiments, antisense activity against the target is reduced by such mismatch, but activity against a non-target is reduced by a greater amount. Thus, in certain such embodiments selectivity of the antisense compound is improved. In some embodiments, the mismatch is specifically positioned within an oligonucleotide having a gapmer motif. In certain such embodiments, the mismatch is at position 1, 2, 3, 4, 5, 6, 7, or 8 from the 5′-end of the gap region. In certain such embodiments, the mismatch is at position 9, 8, 7, 6, 5, 4, 3, 2, 1 from the 3′-end of the gap region. In certain such embodiments, the mismatch is at position 1, 2, 3, or 4 from the 5′-end of the wing region. In certain such embodiments, the mismatch is at position 4, 3, 2, or 1 from the 3′-end of the wing region.

[0223] In some embodiments, oligomeric compounds comprise or consist of a modified oligonucleotide that is complementary to a target precursor transcript. In certain such embodiments, the target precursor transcript is a target pre-mRNA. In some embodiments, contacting a cell with a compound complementary to a target precursor transcript modulates processing of the target precursor transcript. In certain such embodiments, the resulting target processed transcript has a different nucleobase sequence (e.g., a corrected mRNA sequence) from the target processed transcript that is produced in the absence of the compound (e.g., defective mRNA sequence). The terms “corrected mRNA” refers to a mRNA sequence that has a different nucleobase sequence from the mRNA produced in the absence of an antisense oligonucleotide in a SNA described herein, which is referred to herein as “defective mRNA”. In some embodiments, the corrected mRNA sequence produces a functional protein (e.g., due to inclusion or exclusion of an exon and/or an intron). In some embodiments, the “defective mRNA” produces a mutated or dysfunctional protein (e.g., due to erroneous inclusion or exclusion of an exon and/or an intron). In some embodiments, the mutated or dysfunctional protein is associated with a disease or disorder related to an abnormality in splice modulation.

[0224] In some embodiments, the target precursor transcript is a target pre-mRNA and contacting a cell with a compound complementary to the target pre-mRNA modulates splicing of the target pre-mRNA. In certain such embodiments, the resulting target mRNA has a different nucleobase sequence than the target mRNA that is produced in the absence of the compound. In certain such embodiments, an exon is excluded from the target mRNA. In some embodiments, an exon is included in the target mRNA. In some embodiments, the exclusion or inclusion of an exon induces or prevents nonsense mediated decay of the target mRNA, removes or adds a premature termination codon from the target mRNA, and/or changes the reading frame of the target mRNA.

[0225] As used herein, “double-stranded antisense compound” refers to an antisense compound comprising two oligomeric compounds that are complementary to each other and form a duplex, and wherein one of the two said oligomeric compounds comprises an antisense oligonucleotide.

[0226] As used herein, “hybridization” refers to the pairing or annealing of complementary oligonucleotides and/or nucleic acids. While not limited to a particular mechanism, the most common mechanism of hybridization involves hydrogen bonding, which may be Watson-Crick, Hoogsteen or reversed Hoogsteen hydrogen bonding, between complementary nucleobases.

[0227] As used herein, “inhibiting the expression or activity” refers to a reduction or blockade of the expression or activity relative to the expression of activity in an untreated or control sample and does not necessarily indicate a total elimination of expression or activity. In some embodiments, total elimination of expression or activity is obtained.

[0228] As used herein, “lower”, “reduced”, “reduction” or “decrease” or “inhibit” means a decrease by at least 10% as compared to a reference sample or baseline, for example a decrease of reduction by at least about 20%, or at least about 30%, or at least about 40%, or at least about 50%, or at least about 60%, or at least about 70%, or at least about 80%, or at least about 90% or up to and including a 100% decrease (i.e. absent level as compared to a reference sample or baseline), or any decrease between 10-100% as compared to a reference level. When “decrease” or “inhibition” is used in the context of the level of expression or activity of a gene or a protein, it refers to a reduction in protein or nucleic acid level or activity in a cell, a cell extract, or a cell supernatant. For example, such a decrease may be due to reduced RNA stability, transcription, or translation, increased protein degradation, or RNA interference.

[0229] As used herein, “up-regulate”, “increase” or “higher” means an increase of at least 10% as compared to a reference level, for example an increase of at least about 20%, or at least about 30%, or at least about 40%, or at least about 50%, or at least about 60%, or at least about 70%, or at least about 80%, or at least about 90% or a 100% increase or more, or any increase between 10-100% as compared to a reference sample or baseline, or an increase greater than 100%, for example, an increase at least about a 2-fold, or at least about a 3-fold, or at least about a 4-fold, or at least about a 5-fold or at least about a 10-fold increase, or any increase between 2-fold and 10-fold or greater as compared to a reference sample or baseline. When “increase” is used in the context of the expression or activity of a gene or protein, it refers to a positive change in protein or nucleic acid level or activity in a cell, a cell extract, or a cell supernatant. For example, such an increase may be due to increased RNA stability, transcription, or translation, or decreased protein degradation. Preferably, this increase is at least 5%, at least about 10%, at least about 25%, at least about 50%, at least about 75%, at least about 80%, at least about 100%, at least about 200%, or even about 500% or more over the level of expression or activity under control conditions.

[0230] An oligonucleotide disclosed herein, such as an antisense oligonucleotide, includes a strand of linked nucleosides connected via internucleoside linkages, wherein each nucleoside and internucleoside linkage may be modified or unmodified. In some embodiments, the length of an oligonucleotide described herein, such as an antisense oligonucleotide, is of 2-500 linked nucleosides. In some embodiments, the length of an oligonucleotide described herein, is of 2-200, 2-195, 2-190, 2-185, 2-180, 2-175, 2-170, 2-165, 2-160, 2-155, 2-150, 2-145, 2-140, 2-135, 2-130, 2-125, 2-120, 2-115, 2-110, 2-105, 2-100, 2-95, 2-90, 2-85, 2-80, 2-75, 2-70, 2-65, 2-60, 2-55, 2-50, 2-45, 2-40, 2-39, 2-38, 2-37, 2-36, 2-35, 2-34, 2-33, 2-32, 2-31, 2-30, 2-29, 2-28, 2-27, 2-26, 2-25, 2-24, 2-23, 2-22, 2-21, 2-20, 2-19, 2-18, 2-17, 2-16, 2-15, 2-14, 2-13, 2-12, 2-11, 2-10, 2-9, 2-8, 2-7, 2-6, 2-5, 2-4, 4-200, 4-195, 4-190, 4-185, 4-180, 4-175, 4-170, 4-165, 4-160, 4-155, 4-150, 4-145, 4-140, 4-135, 4-130, 4-125, 4-120, 4-115, 4-110, 4-105, 4-100, 4-95, 4-90, 4-85, 4-80, 4-75, 4-70, 4-65, 4-60, 4-55, 4-50, 4-45, 4-40, 4-39, 4-38, 4-37, 4-36, 4-35, 4-34, 4-33, 4-32, 4-31, 4-30, 4-29, 4-28, 4-27, 4-26, 4-25, 4-24, 4-23, 4-22, 4-21, 4-20, 4-19, 4-18, 4-17, 4-16, 4-15, 4-14, 4-13, 4-12, 4-11, 4-10, 4-9, 4-8, 4-7, 4-6, 4-5, 6-200, 6-195, 2-190, 6-185, 6-180, 6-175, 6-170, 6-165, 6-160, 6-155, 6-150, 6-145, 6-140, 6-135, 6-130, 6-125, 6-120, 6-115, 6-110, 6-105, 6-100, 6-95, 6-90, 6-85, 6-80, 6-75, 6-70, 6-65, 6-60, 6-55, 6-50, 6-45, 6-40, 6-39, 6-38, 6-37, 6-36, 6-35, 6-34, 6-33, 6-32, 6-31, 6-30, 6-29, 6-28, 6-27, 6-26, 6-25, 6-24, 6-23, 6-22, 6-21, 6-20, 6-19, 6-18, 6-17, 6-16, 6-15, 6-14, 6-13, 6-12, 6-11, 6-10, 6-9, 6-8, 6-7, 2-200, 8-195, 8-190, 8-185, 8-180, 8-175, 8-170, 8-165, 8-160, 8-155, 8-150, 8-145, 8-140, 8-135, 8-130, 8-125, 8-120, 8-115, 8-110, 8-105, 8-100, 8-95, 8-90, 8-85, 8-80, 8-75, 8-70, 8-65, 8-60, 8-55, 8-50, 8-45, 8-40, 8-39, 8-38, 8-37, 8-36, 8-35, 8-34, 8-33, 8-32, 8-31, 8-30, 8-29, 8-28, 8-27, 8-26, 8-25, 8-24, 8-23, 8-22, 8-21, 8-20, 8-19, 8-18, 8-17, 8-16, 8-15, 8-14, 8-13, 8-12, 8-11, 8-10, 2-200, 10-195, 10-190, 10-185, 10-180, 10-175, 10-170, 10-165, 10-160, 10-155, 10-150, 10-145, 10-140, 10-135, 10-130, 10-125, 10-120, 10-115, 10-110, 10-105, 10-100, 10-95, 10-90, 10-85, 10-80, 10-75, 10-70, 10-65, 10-60, 10-55, 10-50, 10-45, 10-40, 10-39, 10-38, 10-37, 10-36, 10-35, 10-34, 10-33, 10-32, 10-31, 10-30, 10-29, 10-28, 10-27, 10-26, 10-25, 10-24, 10-23, 10-22, 10-21, 10-20, 10-19, 10-18, 10-17, 10-16, 10-15, 10-14, 10-13, or 10-12 linked nucleosides or linked nucleosides in length.

[0231] In some embodiments, an oligonucleotide (e.g., antisense oligonucleotide) is two to 100 linked nucleosides in length, two linked nucleosides in length, three linked nucleosides in length, four linked nucleosides in length, five linked nucleosides in length, six linked nucleosides in length, seven linked nucleosides in length, eight linked nucleosides in length, nine linked nucleosides in length, 10 linked nucleosides in length, 11 linked nucleosides in length, 12 linked nucleosides in length, 13 linked nucleosides in length, 14 linked nucleosides in length, 15 linked nucleosides in length, 16 linked nucleosides in length, 17 linked nucleosides in length, 18 linked nucleosides in length, 19 linked nucleosides in length, 20 linked nucleosides in length, 21 linked nucleosides in length, 22 linked nucleosides in length, 23 linked nucleosides in length, 24 linked nucleosides in length, 25 linked nucleosides in length, 26 linked nucleosides in length, 27 linked nucleosides in length, 28 linked nucleosides in length, 29 linked nucleosides in length, 30 linked nucleosides in length, 31 linked nucleosides in length, 32 linked nucleosides in length, 33 linked nucleosides in length, 34 linked nucleosides in length, 35 linked nucleosides in length, 36 linked nucleosides in length, 37 linked nucleosides in length, 38 linked nucleosides in length, 39 linked nucleosides in length, 40 linked nucleosides in length, 41 linked nucleosides in length, 42 linked nucleosides in length, 43 linked nucleosides in length, 44 linked nucleosides in length, 45 linked nucleosides in length, 46 linked nucleosides in length, 47 linked nucleosides in length, 49 linked nucleosides in length, 50 linked nucleosides in length, 52 linked nucleosides in length, 54 linked nucleosides in length, 56 linked nucleosides in length, 58 linked nucleosides in length, 60 linked nucleosides in length, 62 linked nucleosides in length, 64 linked nucleosides in length, 66 linked nucleosides in length, 68 linked nucleosides in length, 70 linked nucleosides in length, 72 linked nucleosides in length, 74 linked nucleosides in length, 76 linked nucleosides in length, 78 linked nucleosides in length, 80 linked nucleosides in length, 82 linked nucleosides in length, 84 linked nucleosides in length, 86 linked nucleosides in length, 88 linked nucleosides in length, 90 linked nucleosides in length, 92 linked nucleosides in length, 94 linked nucleosides in length, 96 linked nucleosides in length, 100 linked nucleosides in length, or any range or combination thereof.

[0232] As used herein, “modified oligonucleotide” means an oligonucleotide, wherein at least one nucleoside or internucleoside linkage is modified. As used herein, “unmodified oligonucleotide” means an oligonucleotide that does not comprise any nucleoside modifications or internucleoside modifications. In some embodiments, modified oligonucleotides having one or more modified sugar moieties at the 2′ position have enhanced pharmacologic activity for modulation of splicing of a pre-mRNA of interest, including increasing the percentage of transcripts containing a corrected mRNA sequence.

[0233] As used herein, “mismatch” or “non-complementary” means a nucleobase of a first oligonucleotide that is not complementary with the corresponding nucleobase of a second oligonucleotide or target nucleic acid when the first and second oligomeric compound are aligned. As used herein, “naturally occurring” means found in nature.

[0234] As used herein, “ameliorate” in reference to a treatment improvement in at least one symptom relative to the same symptom in the absence of the treatment. In some embodiments, the treatment is of a neurodegenerative disorder described herein, such as treatment of disease or disorder disclosed in Table 1. In some embodiments, amelioration is the reduction in the severity or frequency of a symptom or the delayed onset or slowing of progression in the severity or frequency of a symptom associated with a disease or disorder described herein.

[0235] As used herein, a “cell-targeting moiety” refers to a conjugate group or portion of a conjugate group that results in improved uptake to a particular cell type and/or distribution to a particular tissue relative to an oligomeric compound lacking the cell-targeting moiety.

[0236] As used herein, “complementary” to an oligonucleotide described means that at least 70% of the nucleobases of such oligonucleotide or one or more regions thereof and the nucleobases of another nucleic acid or one or more regions thereof are capable of hydrogen bonding with one another when the nucleobase sequence of the oligonucleotide and the other nucleic acid are aligned in opposing directions. Complementary nucleobases means nucleobases that are capable of forming hydrogen bonds with one another. Complementary nucleobase pairs include adenine (A) and thymine (T), adenine (A) and uracil (U), cytosine (C) and guanine (G), 5-methyl cytosine (^{m}C) and guanine (G). Complementary oligonucleotides and/or nucleic acids need not have nucleobase complementarity at each nucleoside. Rather, some mismatches are tolerated. As used herein, “fully complementary” or “100% complementary” in reference to an oligonucleotide described herein means that such oligonucleotides are complementary to another oligonucleotide or nucleic acid at each nucleoside of the oligonucleotide.

[0237] As used herein, the terms “internucleoside linkage” refers to a group or bond that forms a covalent linkage between adjacent nucleosides in an oligonucleotide. As used herein, a “modified internucleoside linkage” refers to any internucleoside linkage other than a naturally occurring, phosphate internucleoside linkage or phosphodiester linkage. Non-phosphate linkages are referred to herein as modified internucleoside linkages.

[0238] In some embodiments, the internucleoside linkage is a phosphorothioate linkage. As used herein, “phosphorothioate linkage” refers to a modified phosphate linkage in which one of the non-bridging oxygen atoms is replaced with a sulfur atom. A phosphorothioate internucleoside linkage is a modified internucleoside linkage. In some embodiments, all or 100% of the internucleoside linkages of an antisense oligonucleotide described herein are phosphodiesters. In some embodiments, less than all or less than 100% of the internucleoside linkages of an antisense oligonucleotide described herein are phosphodiester linkages. In some embodiments, 5-20%, 5-50%, 5-75%, 5-100%, 10-20%, 10-50%, 10-75% or 10-100% of the internucleoside linkages are phosphodiester linkages. In some embodiments, less than all of the internucleoside linkages in the antisense oligonucleotide are phosphodiester linkages. In some embodiments, all of the internucleoside linkages in the antisense oligonucleotide are phosphodiester linkages. In some embodiments, 1%, 2%, 3%, 4%, 5%, 6%, 7%, 8%, 9%, 10%, 11%, 12%, 13%, 14%, 15%, 16%, 17%, 18%, 19%, 20%, 25%, 30%, 35%, 40%, 45%, 50%, 55%, 60%, 65%, 70%, 75%, 80%, 85%, 90%, 95%, or 99% of the internucleoside linkages in the antisense oligonucleotide are phosphodiester linkages.

[0239] In some embodiments, one of the internucleoside linkages, two of the internucleoside linkages, three of the internucleoside linkages, four of the internucleoside linkages, five of the internucleoside linkages, six of the internucleoside linkages, seven of the internucleoside linkages, eight of the internucleoside linkages, nine of the internucleoside linkages, 10 of the internucleoside linkages, 11 of the internucleoside linkages, 12 of the internucleoside linkages, 13 of the internucleoside linkages, 14 of the internucleoside linkages, 15 of the internucleoside linkages, 16 of the internucleoside linkages, 17 of the internucleoside linkages, 18 of the internucleoside linkages, 19 of the internucleoside linkages, 20 of the internucleoside linkages, 21 of the internucleoside linkages, 22 of the internucleoside linkages, 23 of the internucleoside linkages, 24 of the internucleoside linkages, 25 of the internucleoside linkages, 26 of the internucleoside linkages, 27 of the internucleoside linkages, 28 of the internucleoside linkages, 29 of the internucleoside linkages, 30 of the internucleoside linkages, 31 of the internucleoside linkages, 32 of the internucleoside linkages, 33 of the internucleoside linkages, 34 of the internucleoside linkages, 35 of the internucleoside linkages, 36 of the internucleoside linkages, 37 of the internucleoside linkages, 38 of the internucleoside linkages, 39 of the internucleoside linkages, 40 of the internucleoside linkages, 41 of the internucleoside linkages, 42 of the internucleoside linkages, 43 of the internucleoside linkages, 44 of the internucleoside linkages, 45 of the internucleoside linkages, 46 of the internucleoside linkages, 47 of the internucleoside linkages, 49 of the internucleoside linkages, 50 of the internucleoside linkages, 52 of the internucleoside linkages, 54 of the internucleoside linkages, 56 of the internucleoside linkages, 58 of the internucleoside linkages, 60 of the internucleoside linkages, 62 of the internucleoside linkages, 64 of the internucleoside linkages, 66 of the internucleoside linkages, 68 of the internucleoside linkages, 70 of the internucleoside linkages, 72 of the internucleoside linkages, 74 of the internucleoside linkages, 76 of the internucleoside linkages, 78 of the internucleoside linkages, 80 of the internucleoside linkages, 82 of the internucleoside linkages, 84 of the internucleoside linkages, 86 of the internucleoside linkages, 88 of the internucleoside linkages, 90 of the internucleoside linkages, 92 of the internucleoside linkages, 94 of the internucleoside linkages, 96 of the internucleoside linkages, 100 nucleotides or more than 100 of the internucleoside linkages, or any range or combination thereof of an antisense oligonucleotide described herein are phosphodiester linkages.

[0240] In some embodiments, 5-20%, 5-50%, 5-75%, 5-100%, 10-20%, 10-50%, 10-75% or 10-100% of the internucleoside linkages of an antisense oligonucleotide described herein are phosphorothioate linkages. In some embodiments, all of the internucleoside linkages in the antisense oligonucleotide are phosphorothioate linkages. In some embodiments, 1%, 2%, 3%, 4%, 5%, 6%, 7%, 8%, 9%, 10%, 11%, 12%, 13%, 14%, 15%, 16%, 17%, 18%, 19%, 20%, 25%, 30%, 35%, 40%, 45%, 50%, 55%, 60%, 65%, 70%, 75%, 80%, 85%, 90%, 95%, or 99% of the internucleoside linkages in the antisense oligonucleotide are phosphorothioate linkages. In some embodiments, one of the internucleoside linkages, two of the internucleoside linkages, three of the internucleoside linkages, four of the internucleoside linkages, five of the internucleoside linkages, six of the internucleoside linkages, seven of the internucleoside linkages, eight of the internucleoside linkages, nine of the internucleoside linkages, 10 of the internucleoside linkages, 11 of the internucleoside linkages, 12 of the internucleoside linkages, 13 of the internucleoside linkages, 14 of the internucleoside linkages, 15 of the internucleoside linkages, 16 of the internucleoside linkages, 17 of the internucleoside linkages, 18 of the internucleoside linkages, 19 of the internucleoside linkages, 20 of the internucleoside linkages, 21 of the internucleoside linkages, 22 of the internucleoside linkages, 23 of the internucleoside linkages, 24 of the internucleoside linkages, 25 of the internucleoside linkages, 26 of the internucleoside linkages, 27 of the internucleoside linkages, 28 of the internucleoside linkages, 29 of the internucleoside linkages, 30 of the internucleoside linkages, 31 of the internucleoside linkages, 32 of the internucleoside linkages, 33 of the internucleoside linkages, 34 of the internucleoside linkages, 35 of the internucleoside linkages, 36 of the internucleoside linkages, 37 of the internucleoside linkages, 38 of the internucleoside linkages, 39 of the internucleoside linkages, 40 of the internucleoside linkages, 41 of the internucleoside linkages, 42 of the internucleoside linkages, 43 of the internucleoside linkages, 44 of the internucleoside linkages, 45 of the internucleoside linkages, 46 of the internucleoside linkages, 47 of the internucleoside linkages, 49 of the internucleoside linkages, 50 of the internucleoside linkages, 52 of the internucleoside linkages, 54 of the internucleoside linkages, 56 of the internucleoside linkages, 58 of the internucleoside linkages, 60 of the internucleoside linkages, 62 of the internucleoside linkages, 64 of the internucleoside linkages, 66 of the internucleoside linkages, 68 of the internucleoside linkages, 70 of the internucleoside linkages, 72 of the internucleoside linkages, 74 of the internucleoside linkages, 76 of the internucleoside linkages, 78 of the internucleoside linkages, 80 of the internucleoside linkages, 82 of the internucleoside linkages, 84 of the internucleoside linkages, 86 of the internucleoside linkages, 88 of the internucleoside linkages, 90 of the internucleoside linkages, 92 of the internucleoside linkages, 94 of the internucleoside linkages, 96 of the internucleoside linkages, 100 nucleotides or more than 100 of the internucleoside linkages, or any range or combination thereof of an antisense oligonucleotide described herein are phosphorothioate linkages.

[0241] As used herein, “phosphodiester internucleoside linkage” means a phosphate group that is covalently bonded to two adjacent nucleosides of a modified oligonucleotide.

[0242] In some embodiments, an antisense oligonucleotide described herein is attached or inserted in to the surface of the lipid-containing core through conjugation to one or more linker or linker moieties. Non-limiting examples of linker or linker moieties contemplated herein include: tocopherols, sphingolipids such as sphingosine, sphingosine phosphate, methylated sphingosines and sphinganines, ceramides, ceramide phosphates, 1-0 acyl ceramides, dihydroceramides, 2-hydroxy ceramides, sphingomyelin, glycosylated sphingolipids, sulfatides, gangliosides, phosphosphingolipids, and phytosphingosines of various lengths and saturation states and their derivatives, phospholipids such as phosphatidylcholines, lysophosphatidylcholines, phosphatidic acids, lysophosphatidic acids, cyclic LPA, phosphatidylethanolamines, lysophosphatidylethanolamines, phosphatidylglycerols, lysophosphatidylglycerols, phosphatidylserines, lysophosphatidylserines, phosphatidylinositols, inositol phosphates, LPI, cardiolipins, lysocardiolipins, bis(monoacylglycero) phosphates, (diacylglycero) phosphates, ether lipids, diphytanyl ether lipids, and plasmalogens of various lengths, saturation states, and their derivatives, sterols such as cholesterol, desmosterol, stigmasterol, lanosterol, lathosterol, diosgenin, sitosterol, zymosterol, zymostenol, 14-demethyl-lanosterol, cholesterol sulfate, DHEA, DHEA sulfate, 14-demethyl-14-dehydrianosterol, sitostanol, campesterol, ether anionic lipids, ether cationic lipids, lanthanide chelating lipids, A-ring substituted oxysterols, B-ring substituted oxysterols, D-ring substituted oxysterols, side-chain substituted oxysterols, double substituted oxysterols, cholestanoic acid derivatives, fluorinated sterols, fluorescent sterols, sulfonated sterols, phosphorylated sterols, and polyunsaturated sterols of different lengths, saturation states, and their derivatives.

[0243] A spherical nucleic acid (SNA) can be functionalized in order to attach a polynucleotide. Alternatively or additionally, the polynucleotide can be functionalized. One mechanism for functionalization is the alkanethiol method, whereby oligonucleotides are functionalized with alkanethiols at their 3′ or 5′ termini prior to attachment to gold nanoparticles or nanoparticles comprising other metals, semiconductors or magnetic materials. Such methods are described, for example Whitesides, Proceedings of the Robert A. Welch Foundation 39th Conference On Chemical Research Nanophase Chemistry, Houston. Tex., pages 109-121 (1995), and Mucic et al. Chem. Commun. 555-557 (1996). Oligonucleotides can also be attached to nanoparticles using other functional groups such as phosophorothioate groups, as described in and incorporated by reference from U.S. Pat. No. 5,472,881, or substituted alkylsiloxanes, as described in and incorporated by reference from Burwell, Chemical Technology, 4, 370-377 (1974) and Matteucci and Caruthers, J. Am. Chem. Soc., 103, 3185-3191 (1981). In some instances, polynucleotides are attached to nanoparticles by terminating the polynucleotide with a 5′ or 3′ thionucleoside. In other instances, an aging process is used to attach polynucleotides to nanoparticles as described in and incorporated by reference from U.S. Pat. Nos. 6,361,944, 6,506,569, 6,767,702 and 6,750,016 and PCT Publication Nos. WO 1998/004740, WO 2001/000876. WO 2001/051665 and WO 2001/073123.

[0244] In some instances, the oligonucleotide is attached or inserted in the SNA. A spacer can be included between the attachment site and the oligonucleotide. In some embodiments, a spacer comprises or consists of an oligonucleotide, a peptide, a polymer or an oligoethylene glycol. In a preferred embodiment, the spacer is oligoethylene glycol and more preferably, hexaethyleneglycol. In some embodiments, a spacer does not comprise or does not consist of an oligonucleotide (e.g., non-nucleotidic linker), a peptide, a polymer or an oligoethylene.

[0245] As used herein, “precursor transcript” means a coding or non-coding RNA that undergoes processing to form a processed or mature form of the transcript. Precursor transcripts include but are not limited to pre-mRNAs, long non-coding RNAs, pri-miRNAs, and intronic RNAs.

[0246] As used herein, “processing” in reference to a precursor transcript means the conversion of a precursor transcript to form the corresponding processed transcript. Processing of a precursor transcript includes but is not limited to nuclease cleavage events at processing sites of the precursor transcript.

[0247] The terms “oligonucleotide”, “polynucleotide” and “nucleic acid” are used interchangeably to mean multiple nucleotides (i.e., molecules comprising a sugar (e.g., ribose or deoxyribose) linked to a phosphate group and to an exchangeable organic base, which is either a substituted pyrimidine (e.g., cytosine (C), thymidine (T) or uracil (U)) or a substituted purine (e.g., adenine (A) or guanine (G)). Thus, the term embraces both DNA and RNA oligonucleotides. The terms shall also include polynucleosides (i.e., a polynucleotide minus the phosphate) and any other organic base containing polymer. Oligonucleotides can be obtained from existing nucleic acid sources (e.g., genomic or cDNA), but are preferably synthetic (e.g., produced by nucleic acid synthesis). In some embodiments, an oligonucleotide is an antisense oligonucleotide.

[0248] A polynucleotide of the SNA and optionally attached to a SNA core can be single stranded or double stranded. A double stranded polynucleotide is also referred to herein as a duplex. Double-stranded oligonucleotides of the invention can comprise two separate complementary nucleic acid strands.

[0249] As used herein, “duplex” includes a double-stranded nucleic acid molecule(s) in which complementary sequences are hydrogen bonded to each other. The complementary sequences can include a sense strand and an antisense strand. The antisense nucleotide sequence can be identical or sufficiently identical to the target gene to mediate effective target gene inhibition (e.g., at least about 98% identical, 96% identical, 94%, 90% identical, 85% identical, or 80% identical) to the target gene sequence.

[0250] A double-stranded polynucleotide can be double-stranded over its entire length, meaning it has no overhanging single-stranded sequences and is thus blunt-ended. In other embodiments, the two strands of the double-stranded polynucleotide can have different lengths producing one or more single-stranded overhangs. A double-stranded polynucleotide of the invention can contain mismatches and/or loops or bulges. In some embodiments, it is double-stranded over at least about 70%, 80%, 90%, 95%, 96%, 97%, 98% or 99% of the length of the oligonucleotide. In some embodiments, the double-stranded polynucleotide of the invention contains at least or up to 1, 2, 3, 4, 5, 6, 7, 8, 9, 10, 11, 12, 13, 14, or 15 mismatches.

[0251] Polynucleotides associated with the invention can be modified such as at the sugar moiety, the phosphodiester linkage, and/or the base. As used herein, “sugar moieties” includes natural, unmodified sugars, including pentose, hexose, conformationally flexible sugars, conformationally locked sugars, arabinose, ribose and deoxyribose, modified sugars and sugar analogs. Modifications of sugar moieties can include replacement of a hydroxyl group with a halogen, a heteroatom, or an aliphatic group, and can include functionalization of the hydroxyl group as, for example, an ether, amine or thiol.

[0252] Modification of sugar moieties can include 2-O-methyl nucleotides, which are referred to as “methylated.” In some instances, polynucleotides associated with the invention may only contain modified or unmodified sugar moieties, while in other instances, polynucleotides contain some sugar moieties that are modified and some that are not. In some embodiments, all of the nucleotides in the oligonucleotide (e.g., antisense oligonucleotide) include a 2′O methyl modification. In some embodiments, 1%, 2%, 3%, 4%, 5%, 6%, 7%, 8%, 9%, 10%, 11%, 12%, 13%, 14%, 15%, 16%, 17%, 18%, 19%, 20%, 25%, 30%, 35%, 40%, 45%, 50%, 55%, 60%, 65%, 70%, 75%, 80%, 85%, 90%, 95%, or 99% of the nucleotides include a 2′O methyl modification.

[0253] In some instances, modified nucleomonomers include sugar- or backbone-modified ribonucleotides. Modified ribonucleotides can contain a non-naturally occurring base such as uridines or cytidines modified at the 5′-position, e.g., 5′-(2-amino)propyl uridine and 5′-bromo uridine; adenosines and guanosines modified at the 8-position, e.g., 8-bromo guanosine; deaza nucleotides, e.g., 7-deaza-adenosine; and N-alkylated nucleotides, e.g., N6-methyl adenosine. Also, sugar-modified ribonucleotides can have the 2′-OH group replaced by an H, alkoxy (or OR), R or alkyl, halogen, SH, SR, amino (such as NH2, NHR, NR2,), or CN group, wherein R is lower alkyl, alkenyl, or alkynyl. In some embodiments, modified ribonucleotides can have the phosphodiester group connecting to adjacent ribonucleotides replaced by a modified group, such as a phosphorothioate group.

[0254] In some aspects, 2′-O-methyl modifications can be beneficial for reducing undesirable cellular stress responses, such as the interferon response to double-stranded nucleic acids. Modified sugars can include D-ribose, 2′-O-alkyl (including 2′-O-methyl and 2′-O-ethyl), i.e., 2′-alkoxy, 2′-amino, 2′-S-alkyl, 2′-halo (including 2′-fluoro), 2′-methoxyethoxy, 2′-allyloxy (—OCH2CH═CH2), 2′-propargyl, 2′-propyl, ethynyl, ethenyl, propenyl, and cyano and the like. The sugar moiety can also be a hexose or arabinose.

[0255] The term “alkyl” includes saturated aliphatic groups, including straight-chain alkyl groups (e.g., methyl, ethyl, propyl, butyl, pentyl, hexyl, heptyl, octyl, nonyl, decyl, etc.), branched-chain alkyl groups (isopropyl, tert-butyl, isobutyl, etc.), cycloalkyl (alicyclic) groups (cyclopropyl, cyclopentyl, cyclohexyl, cycloheptyl, cyclooctyl), alkyl substituted cycloalkyl groups, and cycloalkyl substituted alkyl groups. In some embodiments, a straight chain or branched chain alkyl has 6 or fewer carbon atoms in its backbone (e.g., C1-C6 for straight chain, C3-C6 for branched chain), and more preferably 4 or fewer. Likewise, preferred cycloalkyls have from 3-8 carbon atoms in their ring structure, and more preferably have 5 or 6 carbons in the ring structure. The term C1-C6 includes alkyl groups containing 1 to 6 carbon atoms. Unless otherwise specified, the term alkyl includes both “unsubstituted alkyls” and “substituted alkyls,” the latter of which refers to alkyl moieties having independently selected substituents replacing a hydrogen on one or more carbons of the hydrocarbon backbone. Such substituents can include, for example, alkenyl, alkynyl, halogen, hydroxyl, alkylcarbonyloxy, arylcarbonyloxy, alkoxycarbonyloxy, aryloxycarbonyloxy, carboxylate, alkylcarbonyl, arylcarbonyl, alkoxycarbonyl, aminocarbonyl, alkylaminocarbonyl, dialkylaminocarbonyl, alkylthiocarbonyl, alkoxyl, phosphate, phosphonato, phosphinato, cyano, amino (including alkyl amino, dialkylamino, arylamino, diarylamino, and alkylarylamino), acylamino (including alkylcarbonylamino, arylcarbonylamino, carbamoyl and ureido), amidino, imino, sulfhydryl, alkylthio, arylthio, thiocarboxylate, sulfates, alkylsulfinyl, sulfonato, sulfamoyl, sulfonamido, nitro, trifluoromethyl, cyano, azido, heterocyclyl, alkylaryl, or an aromatic or heteroaromatic moiety. Cycloalkyls can be further substituted, e.g., with the substituents described above. An “alkylaryl” or an “arylalkyl” moiety is an alkyl substituted with an aryl (e.g., phenylmethyl (benzyl)). The term “alkyl” also includes the side chains of natural and unnatural amino acids. The term “n-alkyl” means a straight chain (i.e., unbranched) unsubstituted alkyl group.

[0256] The term “alkenyl” includes unsaturated aliphatic groups analogous in length and possible substitution to the alkyls described above, but that contain at least one double bond. For example, the term “alkenyl” includes straight-chain alkenyl groups (e.g., ethylenyl, propenyl, butenyl, pentenyl, hexenyl, heptenyl, octenyl, nonenyl, decenyl, etc.), branched-chain alkenyl groups, cycloalkenyl (alicyclic) groups (cyclopropenyl, cyclopentenyl, cyclohexenyl, cycloheptenyl, cyclooctenyl), alkyl or alkenyl substituted cycloalkenyl groups, and cycloalkyl or cycloalkenyl substituted alkenyl groups. In some embodiments, a straight chain or branched chain alkenyl group has 6 or fewer carbon atoms in its backbone (e.g., C2-C6 for straight chain, C3-C6 for branched chain). Likewise, cycloalkenyl groups may have from 3-8 carbon atoms in their ring structure, and more preferably have 5 or 6 carbons in the ring structure. The term C2-C6 includes alkenyl groups containing 2 to 6 carbon atoms.

[0257] Unless otherwise specified, the term alkenyl includes both “unsubstituted alkenyls” and “substituted alkenyls,” the latter of which refers to alkenyl moieties having independently selected substituents replacing a hydrogen on one or more carbons of the hydrocarbon backbone. Such substituents can include, for example, alkyl groups, alkynyl groups, halogens, hydroxyl, alkylcarbonyloxy, arylcarbonyloxy, alkoxycarbonyloxy, aryloxycarbonyloxy, carboxylate, alkylcarbonyl, arylcarbonyl, alkoxycarbonyl, aminocarbonyl, alkylaminocarbonyl, dialkylaminocarbonyl, alkylthiocarbonyl, alkoxyl, phosphate, phosphonato, phosphinato, cyano, amino (including alkyl amino, dialkylamino, arylamino, diarylamino, and alkylarylamino), acylamino (including alkylcarbonylamino, arylcarbonylamino, carbamoyl and ureido), amidino, imino, sulfhydryl, alkylthio, arylthio, thiocarboxylate, sulfates, alkylsulfinyl, sulfonato, sulfamoyl, sulfonamido, nitro, trifluoromethyl, cyano, azido, heterocyclyl, alkylaryl, or an aromatic or heteroaromatic moiety.

[0258] The term “hydrophobic modifications” refers to modification of bases such that overall hydrophobicity is increased and the base is still capable of forming close to regular Watson-Crick interactions. Non-limiting examples of base modifications include 5-position uridine and cytidine modifications like phenyl, 4-pyridyl, 2-pyridyl, indolyl, and isobutyl, phenyl (C6H5OH); tryptophanyl (C8H6N)CH2CH(NH2)CO), Isobutyl, butyl, aminobenzyl; phenyl; naphthyl,

[0259] The term “heteroatom” includes atoms of any element other than carbon or hydrogen. In some embodiments, preferred heteroatoms are nitrogen, oxygen, sulfur and phosphorus. The term “hydroxy” or “hydroxyl” includes groups with an —OH or —O— (with an appropriate counterion). The term “halogen” includes fluorine, bromine, chlorine, iodine, etc. The term “perhalogenated” generally refers to a moiety wherein all hydrogens are replaced by halogen atoms.

[0260] The term “substituted” includes independently selected substituents which can be placed on the moiety and which allow the molecule to perform its intended function. Examples of substituents include alkyl, alkenyl, alkynyl, aryl, (CR′R″)0-3NR′R″, (CR′R″)0-3CN, NO2, halogen, (CR′R″)0-3C(halogen)3, (CR′R″)0-3CH(halogen)2, (CR′R″)0-3CH2(halogen), (CR′R″)0-3CONR′R″, (CR′R″)0-3S(O)0-2NR′R″, (CR′R″)0-3CHO, (CR′R″)0-30(CR′R″)0-3H, (CR′R″)0-3S(O)0-2R′, (CR′R″)0-30(CR′R″)0-3H, (CR′R″)0-3COR′, (CR′R″)0-3CO2R′, or (CR′R″)0-30R′ groups; wherein each R′ and R″ are each independently hydrogen, a C1-C5 alkyl, C2-C5 alkenyl, C2-C5 alkynyl, or aryl group, or R′ and R″ taken together are a benzylidene group or a —(CH2)2O(CH2)2-group.

[0261] The term “amine” or “amino” includes compounds or moieties in which a nitrogen atom is covalently bonded to at least one carbon or heteroatom. The term “alkyl amino” includes groups and compounds wherein the nitrogen is bound to at least one additional alkyl group. The term “dialkyl amino” includes groups wherein the nitrogen atom is bound to at least two additional alkyl groups.

[0262] The term “ether” includes compounds or moieties which contain an oxygen bonded to two different carbon atoms or heteroatoms. For example, the term includes “alkoxyalkyl,” which refers to an alkyl, alkenyl, or alkynyl group covalently bonded to an oxygen atom which is covalently bonded to another alkyl group.

[0263] The term “base” includes the known purine and pyrimidine heterocyclic bases, deazapurines, and analogs (including heterocyclic substituted analogs, e.g., aminoethyoxy phenoxazine), derivatives (e.g., 1-alkyl-, 1-alkenyl-, heteroaromatic- and 1-alkynyl derivatives) and tautomers thereof. Examples of purines include adenine, guanine, inosine, diaminopurine, and xanthine and analogs (e.g., 8-oxo-N6-methyladenine or 7-diazaxanthine) and derivatives thereof. Pyrimidines include, for example, thymine, uracil, and cytosine, and their analogs (e.g., 5-methylcytosine, 5-methyluracil, 5-(1-propynyl)uracil, 5-(1-propynyl)cytosine and 4,4-ethanocytosine). Other examples of suitable bases include non-purinyl and non-pyrimidinyl bases such as 2-aminopyridine and triazines.

[0264] In some aspects, the nucleomonomers of a polynucleotide of the invention are RNA nucleotides, including modified RNA nucleotides.

[0265] The term “nucleoside” includes bases which are covalently attached to a sugar moiety, preferably ribose or deoxyribose. Examples of preferred nucleosides include ribonucleosides and deoxyribonucleosides. Nucleosides also include bases linked to amino acids or amino acid analogs which may comprise free carboxyl groups, free amino groups, or protecting groups. Suitable protecting groups are well known in the art (see P. G. M. Wuts and T. W. Greene, “Protective Groups in Organic Synthesis”, 2nd Ed., Wiley-Interscience, New York, 1999).

[0266] The term “nucleotide” includes nucleosides which further comprise a phosphate group or a phosphate analog.

[0267] As used herein, the term “linkage” includes a naturally occurring, unmodified phosphodiester moiety (—O—(PO2-)-O—) that covalently couples adjacent nucleoside monomers. As used herein, the term “substitute linkage” includes any analog or derivative of the native phosphodiester group that covalently couples adjacent nucleomonomers. Substitute linkages include phosphodiester analogs, e.g., phosphorothioate, phosphorodithioate, and P-ethyoxyphosphodiester, P-ethoxyphosphodiester, P-alkyloxyphosphotriester, methylphosphonate, and nonphosphorus containing linkages, e.g., acetals and amides. Such substitute linkages are known in the art (e.g., Bjergarde et al. 1991. Nucleic Acids Res. 19:5843; Caruthers et al. 1991. Nucleosides Nucleotides. 10:47). In some embodiments, non-hydrolysable linkages are preferred, such as phosphorothioate linkages.

[0268] In some aspects, polynucleotides of the invention comprise 3′ and 5′ termini (except for circular oligonucleotides). The 3′ and 5′ termini of a polynucleotide can be substantially protected from nucleases, for example, by modifying the 3′ or 5′ linkages (e.g., U.S. Pat. No. 5,849,902 and WO 98/13526). Oligonucleotides can be made resistant by the inclusion of a “blocking group.” The term “blocking group” as used herein refers to substituents (e.g., other than OH groups) that can be attached to oligonucleotides or nucleomonomers, either as protecting groups or coupling groups for synthesis (e.g., FITC, propyl (CH2-CH2-CH3), glycol (—O—CH2-CH2-O—) phosphate (PO32-), hydrogen phosphonate, or phosphoramidite). “Blocking groups” also include “end blocking groups” or “exonuclease blocking groups” which protect the 5′ and 3′ termini of the oligonucleotide, including modified nucleotides and non-nucleotide exonuclease resistant structures.

[0269] Exemplary end-blocking groups include cap structures (e.g., a 7-methylguanosine cap), inverted nucleomonomers, e.g., with 3′-3′ or 5′-5′ end inversions (see, e.g., Ortiagao et al. 1992. Antisense Res. Dev. 2:129), methylphosphonate, phosphoramidite, non-nucleotide groups (e.g., non-nucleotide linker or linker moieties, amino linker or linker moieties, conjugates) and the like. The 3′ terminal nucleomonomer can comprise a modified sugar moiety. The 3′ terminal nucleomonomer comprises a 3′-O that can optionally be substituted by a blocking group that prevents 3′-exonuclease degradation of the oligonucleotide. For example, the 3′-hydroxyl can be esterified to a nucleotide through a 3′-+3′ internucleotide linkage. For example, the alkyloxy radical can be methoxy, ethoxy, or isopropoxy, and preferably, ethoxy. Optionally, the 3′→3′linked nucleotide at the 3′ terminus can be linked by a substitute linkage. To reduce nuclease degradation, the 5′ most 3′→5′ linkage can be a modified linkage, e.g., a phosphorothioate or a P-alkyloxyphosphotriester linkage. Preferably, the two 5′ most 3′→5′ linkages are modified linkages. Optionally, the 5′ terminal hydroxy moiety can be esterified with a phosphorus containing moiety, e.g., phosphate, phosphorothioate, or P-ethoxyphosphate.

[0270] In some embodiments, modified oligonucleotides comprise one or more nucleoside comprising an unmodified nucleobase. In some embodiments, modified oligonucleotides comprise one or more nucleoside comprising a modified nucleobase.

[0271] In some embodiments, modified nucleobases are selected from: 5-substituted pyrimidines, 6-azapyrimidines, alkyl or alkynyl substituted pyrimidines, alkyl substituted purines, and N-2, N-6 and 0-6 substituted purines. In some embodiments, modified nucleobases are selected from: 2-aminopropyladenine, 5-hydroxymethyl cytosine, xanthine, hypoxanthine, 2-aminoadenine, 6-N-methylguanine, 6-N-methyladenine, 2-propyladenine, 2-thiouracil, 2-thiothymine and 2-thiocytosine, 5-propynyl (—C≡C—CH3) uracil, 5-propynylcytosine, 6-azouracil, 6-azocytosine, 6-azothymine, 5-ribosyluracil (pseudouracil), 4-thiouracil, 8-halo, 8-amino, 8-thiol, 8-thioalkyl, 8-hydroxyl, 8-aza and other 8-substituted purines, 5-halo, particularly 5-bromo, 5-trifluoromethyl, 5-halouracil, and 5-halocytosine, 7-methylguanine, 7-methyladenine, 2-F-adenine, 2-aminoadenine, 7-deazaguanine, 7-deazaadenine, 3-deazaguanine, 3-deazaadenine, 6-N-benzoyladenine, 2-N-isobutyrylguanine, 4-N-benzoylcytosine, 4-N-benzoyluracil, 5-methyl 4-N-benzoylcytosine, 5-methyl 4-N-benzoyluracil, universal bases, hydrophobic bases, promiscuous bases, size-expanded bases, and fluorinated bases. Further modified nucleobases include tricyclic pyrimidines, such as 1,3-diazaphenoxazine-2-one, 1,3-diazaphenothiazine-2-one and 9-(2-aminoethoxy)-1,3-diazaphenoxazine-2-one (G-clamp). Modified nucleobases may also include those in which the purine or pyrimidine base is replaced with other heterocycles, for example 7-deaza-adenine, 7-deazaguanosine, 2-aminopyridine and 2-pyridone. Further nucleobases include those disclosed in Merigan et al., U.S. Pat. No. 3,687,808, those disclosed in The Concise Encyclopedia Of Polymer Science And Engineering, Kroschwitz, J. I., Ed., John Wiley & Sons, 1990, 858-859; Englisch et al., Angewandte Chemie, International Edition, 1991, 30, 613; Sanghvi, Y. S., Chapter 15, Antisense Research and Applications, Crooke, S. T. and Lebleu, B., Eds., CRC Press, 1993, 273-288; and those disclosed in Chapters 6 and 15, Antisense Drug Technology, Crooke S. T., Ed., CRC Press, 2008, 163-166 and 442-443.

[0272] Publications that teach the preparation of certain of the above noted modified nucleobases as well as other modified nucleobases include without limitation, Manoharan et al., US2003/0158403; Manoharan et al., US2003/0175906; Dinh et al., U.S. Pat. No. 4,845,205; Spielvogel et al., U.S. Pat. No. 5,130,302; Rogers et al., U.S. Pat. No. 5,134,066; Bischofberger et al., U.S. Pat. No. 5,175,273; Urdea et al., U.S. Pat. No. 5,367,066; Benner et al., U.S. Pat. No. 5,432,272; Matteucci et al., U.S. Pat. No. 5,434,257; Gmeiner et al., U.S. Pat. No. 5,457,187; Cook et al., U.S. Pat. No. 5,459,255; Froehler et al., U.S. Pat. No. 5,484,908; Matteucci et al., U.S. Pat. No. 5,502,177; Hawkins et al., U.S. Pat. No. 5,525,711; Haralambidis et al., U.S. Pat. No. 5,552,540; Cook et al., U.S. Pat. No. 5,587,469; Froehler et al., U.S. Pat. No. 5,594,121; Switzer et al., U.S. Pat. No. 5,596,091; Cook et al., U.S. Pat. No. 5,614,617; Froehler et al., U.S. Pat. No. 5,645,985; Cook et al., U.S. Pat. No. 5,681,941; Cook et al., U.S. Pat. No. 5,811,534; Cook et al., U.S. Pat. No. 5,750,692; Cook et al., U.S. Pat. No. 5,948,903; Cook et al., U.S. Pat. No. 5,587,470; Cook et al., U.S. Pat. No. 5,457,191; Matteucci et al., U.S. Pat. No. 5,763,588; Froehler et al., U.S. Pat. No. 5,830,653; Cook et al., U.S. Pat. No. 5,808,027; Cook et al., U.S. Pat. No. 6,166,199; and Matteucci et al., U.S. Pat. No. 6,005,096.

[0273] In some embodiments, oligonucleotides comprise modified and/or unmodified nucleobases arranged along the oligonucleotide or region thereof in a defined pattern or motif. In some embodiments, each nucleobase is modified. In some embodiments, none of the nucleobases are modified. In some embodiments, each purine or each pyrimidine is modified. In some embodiments, each adenine is modified. In some embodiments, each guanine is modified. In some embodiments, each thymine is modified. In some embodiments, each uracil is modified. In some embodiments, each cytosine is modified. In some embodiments, some or all of the cytosine nucleobases in a modified oligonucleotide are 5-methylcytosines.

[0274] In some embodiments, modified oligonucleotides comprise a block of modified nucleobases. In certain such embodiments, the block is at the 3′-end of the oligonucleotide. In certain embodiments the block is within 3 nucleosides of the 3′-end of the oligonucleotide. In some embodiments, the block is at the 5′-end of the oligonucleotide. In certain embodiments the block is within 3 nucleosides of the 5′-end of the oligonucleotide.

[0275] In some embodiments, oligonucleotides having a gapmer motif comprise a nucleoside comprising a modified nucleobase. In certain such embodiments, one nucleoside comprising a modified nucleobase is in the central gap of an oligonucleotide having a gapmer motif. In certain such embodiments, the sugar moiety of said nucleoside is a 2′-deoxyribosyl moiety. In some embodiments, the modified nucleobase is selected from: a 2-thiopyrimidine and a 5-propynepyrimidine.

[0276] In some aspects, polynucleotides can comprise both DNA and RNA.

[0277] In some aspects, at least a portion of the contiguous polynucleotides are linked by a substitute linkage, e.g., a phosphorothioate linkage. The presence of substitute linkages can improve pharmacokinetics due to their higher affinity for serum proteins.

[0278] In some embodiments, nucleosides of modified oligonucleotides may be linked together using any internucleoside linkage. The two main classes of internucleoside linking groups are defined by the presence or absence of a phosphorus atom. Representative phosphorus-containing internucleoside linkages include but are not limited to phosphates, which contain a phosphodiester bond (“P=0”) (also referred to as unmodified or naturally occurring linkages), phosphotriesters, methylphosphonates, phosphoramidates, and phosphorothioates (“P═S”), and phosphorodithioates (“HS-P═S”). Representative non-phosphorus containing internucleoside linking groups include but are not limited to methylenemethylimino (—CH2-N(CH3)-0-CH2-), thiodiester, thionocarbamate (-0-C(=0)(NH)—S—); siloxane (—O—S1H2-O—); and N,N′-dimethylhydrazine (—CH2-N(CH3)-N(CH3)-). Modified internucleoside linkages, compared to naturally occurring phosphate linkages, can be used to alter, typically increase, nuclease resistance of the oligonucleotide. In some embodiments, internucleoside linkages having a chiral atom can be prepared as a racemic mixture, or as separate enantiomers. Representative chiral internucleoside linkages include but are not limited to alkylphosphonates and phosphorothioates.

[0279] Methods of preparation of phosphorous-containing and non-phosphorous-containing internucleoside linkages are well known to those skilled in the art.

[0280] Neutral internucleoside linkages include, without limitation, phosphotriesters, methylphosphonates, MMI (3′-CH2-N(CH3)-0-5′), amide-3 (3′-CH2-C(═O)—N(H)-5′), amide-4 (3′-CH2-N(H)—C(=0)-5′), formacetal (3′-0-CH2-0-5′), methoxypropyl, and thioformacetal (3′-S-CH2-0-5′). Further neutral internucleoside linkages include nonionic linkages comprising siloxane (dialkylsiloxane), carboxylate ester, carboxamide, sulfide, sulfonate ester and amides (See for example: Carbohydrate Modifications in Antisense Research: Y. S. Sanghvi and P. D. Cook, Eds., ACS Symposium Series 580; Chapters 3 and 4, 40-65). Further neutral internucleoside linkages include nonionic linkages comprising mixed N, O, S and CH2 component parts.

[0281] As used herein, “unmodified sugar moiety” means a 2′-OH(H) furanosyl moiety, as found in RNA (an “unmodified RNA sugar moiety”), or a 2′-H(H) moiety, as found in DNA (an “unmodified DNA sugar moiety”). Unmodified sugar moieties have one hydrogen at each of the 3′, and 4′ positions, an oxygen at the 3′ position, and two hydrogens at the 5′ position. As used herein, “modified sugar moiety” or “modified sugar” means a modified furanosyl sugar moiety or a sugar surrogate. As used herein, modified furanosyl sugar moiety means a furanosyl sugar comprising a non-hydrogen substituent in place of at least one hydrogen of an unmodified sugar moiety. In some embodiments, a modified furanosyl sugar moiety is a 2′-substituted sugar moiety. Such modified furanosyl sugar moieties include bicyclic sugars and non-bicyclic sugars. As used herein, “sugar surrogate” means a modified sugar moiety having other than a furanosyl moiety that can link a nucleobase to another group, such as an internucleoside linkage, conjugate group, or terminal group in an oligonucleotide. Modified nucleosides comprising sugar surrogates can be incorporated into one or more positions within an oligonucleotide and such oligonucleotides are capable of hybridizing to complementary oligomeric compounds or nucleic acids.

[0282] In some embodiments, modified oligonucleotides comprise one or more modified nucleoside comprising a modified sugar. In some embodiments, modified oligonucleotides comprise one or more modified nucleosides comprising a modified nucleobase. In some embodiments, modified oligonucleotides comprise one or more modified internucleoside linkage. In such embodiments, the modified, unmodified, and differently modified sugar moieties, nucleobases, and/or internucleoside linkages of a modified oligonucleotide define a pattern or motif. In some embodiments, the patterns of sugar moieties, nucleobases, and internucleoside linkages are each independent of one another. Thus, a modified oligonucleotide may be described by its sugar motif, nucleobase motif and/or internucleoside linkage motif (as used herein, nucleobase motif describes the modifications to the nucleobases independent of the sequence of nucleobases).

[0283] In some embodiments, oligonucleotides comprise one or more type of modified sugar and/or unmodified sugar moiety arranged along the oligonucleotide or region thereof in a defined pattern or sugar motif. In certain instances, such sugar motifs include but are not limited to any of the sugar modifications discussed herein.

[0284] In some embodiments, modified oligonucleotides comprise or consist of a region having a gapmer motif, which comprises two external regions or “wings” and a central or internal region or “gap.” The three regions of a gapmer motif (the 5′-wing, the gap, and the 3′-wing) form a contiguous sequence of nucleosides wherein at least some of the sugar moieties of the nucleosides of each of the wings differ from at least some of the sugar moieties of the nucleosides of the gap. Specifically, at least the sugar moieties of the nucleosides of each wing that are closest to the gap (the 3′-most nucleoside of the 5′-wing and the 5′-most nucleoside of the 3′-wing) are modified sugar moieties and differ from the sugar moieties of the neighboring gap nucleosides, which are unmodified sugar moieties, thus defining the boundary between the wings and the gap (i.e., the wing/gap junction). In some embodiments, the sugar moieties within the gap are the same as one another. In some embodiments, the gap includes one or more nucleoside having a sugar moiety that differs from the sugar moiety of one or more other nucleosides of the gap. In some embodiments, the sugar motifs of the two wings are the same as one another (symmetric gapmer). In some embodiments, the sugar motif of the 5′-wing differs from the sugar motif of the 3′-wing (asymmetric gapmer).

[0285] In some embodiments, the wings of a gapmer comprise 1-5 nucleosides. In some embodiments, the wings of a gapmer comprise 2-5 nucleosides. In some embodiments, the wings of a gapmer comprise 3-5 nucleosides. In some embodiments, the nucleosides of a gapmer are all modified nucleosides.

[0286] In some embodiments, the gap of a gapmer comprises 7-12 nucleosides. In some embodiments, the gap of a gapmer comprises 7-10 nucleosides. In some embodiments, the gap of a gapmer comprises 8-10 nucleosides. In some embodiments, the gap of a gapmer comprises 10 nucleosides. In certain embodiment, each nucleoside of the gap of a gapmer is an unmodified 2′-deoxy nucleoside.

[0287] In some embodiments, the gapmer is a deoxy gapmer. In such embodiments, the nucleosides on the gap side of each wing/gap junction are unmodified 2′-deoxy nucleosides and the nucleosides on the wing sides of each wing/gap junction are modified nucleosides. In certain such embodiments, each nucleoside of the gap is an unmodified 2′-deoxy nucleoside. In certain such embodiments, each nucleoside of each wing is a modified nucleoside.

[0288] In some embodiments, modified oligonucleotides comprise or consist of a region having a fully modified sugar motif. In such embodiments, each nucleoside of the fully modified region of the modified oligonucleotide comprises a modified sugar moiety. In certain such embodiments, each nucleoside in the entire modified oligonucleotide comprises a modified sugar moiety. In some embodiments, modified oligonucleotides comprise or consist of a region having a fully modified sugar motif, wherein each nucleoside within the fully modified region comprises the same modified sugar moiety, referred to herein as a uniformly modified sugar motif. In some embodiments, a fully modified oligonucleotide is a uniformly modified oligonucleotide. In some embodiments, each nucleoside of a uniformly modified oligonucleotide comprises the same 2′-modification. In some embodiments, each nucleoside of a uniformly modified oligonucleotide comprises a 2′-0-(N-alkyl acetamide) group. In some embodiments, each nucleoside of a uniformly modified oligonucleotide comprises a 2′-0-(N-methyl acetamide) group.

[0289] In some embodiments, the invention provides oligomeric compounds, which consist of an oligonucleotide (modified or unmodified) and optionally one or more conjugate groups and/or terminal groups. Conjugate groups consist of one or more conjugate moiety and a conjugate linker or linker moiety which links the conjugate moiety to the oligonucleotide. Conjugate groups may be attached to either or both ends of an oligonucleotide and/or at any internal position. In some embodiments, conjugate groups are attached to the 2′-position of a nucleoside of a modified oligonucleotide. In some embodiments, conjugate groups that are attached to either or both ends of an oligonucleotide are terminal groups. In certain such embodiments, conjugate groups or terminal groups are attached at the 3′ and/or 5′-end of oligonucleotides. In certain such embodiments, conjugate groups (or terminal groups) are attached at the 3′-end of oligonucleotides. In some embodiments, conjugate groups are attached near the 3′-end of oligonucleotides. In some embodiments, conjugate groups (or terminal groups) are attached at the 5′-end of oligonucleotides. In some embodiments, conjugate groups are attached near the 5′-end of oligonucleotides.

[0290] Examples of terminal groups include but are not limited to conjugate groups, capping groups, phosphate moieties, protecting groups, abasic nucleosides, modified or unmodified nucleosides, and two or more nucleosides that are independently modified or unmodified.

[0291] In some embodiments, oligonucleotides are covalently attached to one or more conjugate groups. In some embodiments, conjugate groups modify one or more properties of the attached oligonucleotide, including but not limited to pharmacodynamics, pharmacokinetics, stability, binding, absorption, tissue distribution, cellular distribution, cellular uptake, charge and clearance. In some embodiments, conjugate groups impart a new property on the attached oligonucleotide, e.g., fluorophores or reporter groups that enable detection of the oligonucleotide. Certain conjugate groups and conjugate moieties have been described previously, for example: cholesterol moiety (Letsinger et al., Proc. Natl. Acad. Sci. USA, 1989, 86, 6553-6556), cholic acid (Manoharan et al., Bioorg. Med. Chem. Lett., 1994, 4, 1053-1060), a thioether, e.g., hexyl-S-tritylthiol (Manoharan et al., Ann. N Y. Acad. Sci., 1992, 660, 306-309; Manoharan et al., Bioorg. Med. Chem. Lett., 1993, 3, 2765-2770), a thiocholesterol (Oberhauser et al., Nucl. Acids Res., 1992, 20, 533-538), an aliphatic chain, e.g., do-decan-diol or undecyl residues (Saison-Behmoaras et al., EMBO J., 1991, 10, 1111-1118Kabanov et al., FEBS Lett., 1990, 259, 327-330; Svinarchuk et al., Biochimie, 1993, 75, 49-54), a phospholipid, e.g., di-hexadecyl-rac-glycerol or triethyl-ammonium 1,2-di-0-hexadecyl-rac-glycero-3-H-phosphonate (Manoharan et al., Tetrahedron Lett., 1995, 36, 3651-3654; Shea et al., Nucl. Acids Res., 1990, 18, 3777-3783), a polyamine or a polyethylene glycol chain (Manoharan et al., Nucleosides & Nucleotides, 1995, 14, 969-973), or adamantane acetic acid, a palmityl moiety (Mishra et al., Biochim. Biophys. Acta, 1995, 1264, 229-237), an octadecylamine or hexylamino-carbonyl-oxycholesterol moiety (Crooke et al., J. Pharmacol. Exp. Ther., 1996, 277, 923-937), a tocopherol group (Nishina et al., Molecular Therapy Nucleic Acids, 2015, 4, e220; and Nishina et al., Molecular Therapy, 2008, 16, 734-740), or a GalNAc cluster (e.g., WO2014/179620).

[0292] In some embodiments, conjugate groups may be selected from any of a C22 alkyl, C20 alkyl, C16 alkyl, C10 alkyl, C21 alkyl, C19 alkyl, C18 alkyl, C15 alkyl, C14 alkyl, C13 alkyl, C12 alkyl, C11 alkyl, C9 alkyl, C8 alkyl, C7 alkyl, C6 alkyl, C5 alkyl, C22 alkenyl, C20 alkenyl, C16 alkenyl, C10 alkenyl, C21 alkenyl, C19 alkenyl, C18 alkenyl, C15 alkenyl, C14 alkenyl, C13 alkenyl, C12 alkenyl, C11 alkenyl, C9 alkenyl, C8 alkenyl, C7 alkenyl, C6 alkenyl, or C5 alkenyl.

[0293] In some embodiments, conjugate groups may be selected from any of C22 alkyl, C20 alkyl, C16 alkyl, C10 alkyl, C21 alkyl, C19 alkyl, C18 alkyl, C15 alkyl, C14 alkyl, C13 alkyl, C12 alkyl, C11 alkyl, C9 alkyl, C8 alkyl, C7 alkyl, C6 alkyl, and C5 alkyl, where the alkyl chain has one or more unsaturated bonds.

[0294] In some embodiments, conjugate moieties include, without limitation, intercalators, reporter molecules, polyamines, polyamides, peptides, carbohydrates (e.g., GalNAc), vitamin moieties, polyethylene glycols, thioethers, polyethers, cholesterols, thiocholesterols, cholic acid moieties, folate, lipids, lipophilic groups, phospholipids, biotin, phenazine, phenanthridine, anthraquinone, adamantane, acridine, fluoresceins, rhodamines, coumarins, fluorophores, and dyes.

[0295] In some embodiments, a conjugate moiety comprises an active drug substance, for example, aspirin, warfarin, phenylbutazone, ibuprofen, suprofen, fen-bufen, ketoprofen, (<S)-(+)-pranoprofen, carprofen, dansylsarcosine, 2,3,5-triiodobenzoic acid, fingolimod, flufenamic acid, folinic acid, a benzothiadiazide, chlorothiazide, a diazepine, indo-methicin, a barbiturate, a cephalosporin, a sulfa drug, an antidiabetic, an antibacterial or an antibiotic.

[0296] In some embodiments, antisense oligonucleotide SNAs are nanoscale constructs composed of: (1) a lipid-containing core, which is formed by arranging non-toxic carrier lipids into a small hollow structure, (2) a shell of oligonucleotides, which is formed by arranging oligonucleotides such that they point radially outwards from the core, and (3) optionally a hydrophobic (e.g. lipid) anchor group, or molecular species as also referred to herein, attached to either the 5′- or 3′-end of the oligonucleotide, depending on whether the oligonucleotides are arranged with the 5′- or 3′-end facing outward from the core. The anchor or molecular species drives the insertion into the liposome and to anchor the oligonucleotides to the lipid-containing core or lipid bilayer.

[0297] A liposomal core as used herein refers to a centrally located core compartment formed by a component of the lipids or phospholipids that form a lipid bilayer. “Liposomes” are artificial, self-closed vesicular structure of various sizes and structures, where one or several membranes encapsulate an aqueous core. Most typically liposome membranes are formed from lipid bilayers membranes, where the hydrophilic head groups are oriented towards the aqueous environment and the lipid chains are embedded in the lipophilic core. Liposomes can be formed as well from other amphiphilic monomeric and polymeric molecules, such as polymers, like block copolymers, or polypeptides. Unilamellar vesicles are liposomes defined by a single membrane enclosing an aqueous space. In contrast, oligo- or multilamellar vesicles are built up of several membranes. Typically, the membranes are roughly 4 nm thick and are composed of amphiphilic lipids, such as phospholipids, of natural or synthetic origin. Optionally, the membrane properties can be modified by the incorporation of other lipids such as sterols or cholic acid derivatives.

[0298] The lipid bilayer is composed of two layers of lipid molecules. Each lipid molecule in a layer is oriented substantially parallel to adjacent lipid bilayers, and two layers that form a bilayer have the polar ends of their molecules exposed to the aqueous phase and the non-polar ends adjacent to each other. The central aqueous region of the liposomal core may be empty or filled fully or partially with water, an aqueous emulsion, oligonucleotides, or other therapeutic or diagnostic agent.

[0299] The lipid-containing core or the lipid bilayer of a liposomal core can be constructed from a wide variety of lipids known to those in the art including but not limited to: sphingolipids such as sphingosine, sphingosine phosphate, methylated sphingosines and sphinganines, ceramides, ceramide phosphates, 1-0 acyl ceramides, dihydroceramides, 2-hydroxy ceramides, sphingomyelin, glycosylated sphingolipids, sulfatides, gangliosides, phosphosphingolipids, and phytosphingosines of various lengths and saturation states and their derivatives, phospholipids such as phosphatidylcholines, lysophosphatidylcholines, phosphatidic acids, lysophosphatidic acids, cyclic LPA, phosphatidylethanolamines, lysophosphatidylethanolamines, phosphatidylglycerols, lysophosphatidylglycerols, phosphatidylserines, lysophosphatidylserines, phosphatidylinositols, inositol phosphates, LPI, cardiolipins, lysocardiolipins, bis(monoacylglycero) phosphates, (diacylglycero) phosphates, ether lipids, diphytanyl ether lipids, and plasmalogens of various lengths, saturation states, and their derivatives, sterols such as cholesterol, desmosterol, stigmasterol, lanosterol, lathosterol, diosgenin, sitosterol, zymosterol, zymostenol, 14-demethyl-lanosterol, cholesterol sulfate, DHEA, DHEA sulfate, 14-demethyl-14-dehydrlanosterol, sitostanol, campesterol, ether anionic lipids, ether cationic lipids, lanthanide chelating lipids, A-ring substituted oxysterols, B-ring substituted oxysterols, D-ring substituted oxysterols, side-chain substituted oxysterols, double substituted oxysterols, cholestanoic acid derivatives, fluorinated sterols, fluorescent sterols, sulfonated sterols, phosphorylated sterols, 1,2-dioleoyl-sn-glycero-3-phosphocholine (DOPC) and polyunsaturated sterols of different lengths, saturation states, and their derivatives.

[0300] In some embodiments, the oligonucleotides may be positioned on the exterior of the core, within the walls of the core and/or in the center of the core. An oligonucleotide that is positioned on the core is typically referred to as coupled to the core. Coupled may be direct or indirect. In some embodiments at least 5, 10, 15, 25, 50, 75, 100, 200, 300, 400, 500, 600, 700, 800, 900, 1000, 5000 or 10,000 oligonucleotides or any range combination thereof are on the exterior of the core. In some embodiments, 1-1000, 10-500, 50-250, or 50-300 oligonucleotides are present on the surface.

[0301] The oligonucleotides of the oligonucleotide shell may be oriented in a variety of directions. In some embodiments the oligonucleotides are oriented radially outwards. The orientation of these oligonucleotides can be either 5′ distal/3′ terminal in relation to the core, or 3′ distal/5′terminal in relation to the core, or laterally oriented around the core. In one embodiment one or a multiplicity of different oligonucleotides are present on the same surface of a single SNA. In all cases, at least 1 oligonucleotide is present on the surface but up to 10,000 can be present.

[0302] In some embodiments, an oligonucleotide or antisense oligonucleotide disclosed herein comprises a linker moiety. The oligonucleotides may be linked or attached to the core or to a lipid bilayer or to one another and/or to other molecules such an active agents either directly or indirectly through a linker or linker moiety. The oligonucleotides may be conjugated to a linker or linker moiety via the 5′ end or the 3′ end. Some or all of the oligonucleotides of the SNA may be linked to one another or the core either directly or indirectly through a covalent or non-covalent linkage. The linkage of one oligonucleotide to another oligonucleotide may be in addition to or alternatively to the linkage of that oligonucleotide to a liposomal core.

[0303] In some embodiments, the linker moiety comprises a molecular species at the 3′ or 5′ terminus of the antisense oligonucleotide, wherein the molecular species is positioned in the liposomal core and the antisense oligonucleotide extends radially from the liposome core.

[0304] In some embodiments, the molecular species is at the 5′ terminus of the antisense oligonucleotide. In some embodiments, the molecular species is attached to the linker moiety.

[0305] In some embodiments, the molecular species is positioned in a core and the oligonucleotide extends radially from the core. In some embodiments, the molecular species is at the 5′ end of the oligonucleotide (e.g., antisense oligonucleotide). In some embodiments, the molecular species is a hydrophobic group. In some embodiments, the hydrophobic group is selected from the group consisting of cholesterol, a cholesteryl or modified cholesteryl residue, stearyl, distearyl, tocopherol, adamantine, dihydrotesterone, long chain alkyl, long chain alkenyl, long chain alkynyl, olely-lithocholic, cholenic, oleoyl-cholenic, decane, dodecane, docosahexaenoyl, palmityl, C6-palmityl, heptadecyl, myrisityl, arachidyl, stearyl, behenyl, linoleyl, bile acids, cholic acid or taurocholic acid, deoxycholate, oleyl litocholic acid, oleoyl cholenic acid, glycolipids, phospholipids, sphingolipids, isoprenoids, such as steroids, vitamins, such as vitamin E, fatty acids either saturated or unsaturated, fatty acid esters, such as triglycerides, pyrenes, porphyrines, Texaphyrine, adamantane, acridines, biotin, coumarin, fluorescein, rhodamine, Texas-Red, digoxygenin, dimethoxytrityl, t-butyldimethylsilyl, t-butyldiphenylsilyl, cyanine dyes (e.g. Cy3 or Cy5), Hoechst 33258 dye, psoralen, or ibuprofen.

[0306] The oligonucleotide shell may be anchored to the surface of the core through one or multiple of linker or linker moiety molecules, including but not limited to: any chemical structure containing one or multiple thiols, such as the various chain length alkane thiols, cyclic dithiol, lipoic acid, or other thiol linkers or linker moieties known to those skilled in the art. In some embodiments, the exterior of the lipid-containing core has an oligonucleotide shell. The oligonucleotide shell can be constructed from a wide variety of nucleic acids including, but not limited to: single-stranded deoxyribonucleotides, ribonucleotides, and other single-stranded oligonucleotides incorporating one or a multiplicity of modifications known to those in the art, double-stranded deoxyribonucleotides, ribonucleotides, and other double-stranded oligonucleotides incorporating one or a multiplicity of modifications known to those in the art, oligonucleotide triplexes incorporating deoxyribonucleotides, ribonucleotides, or oligonucleotides that incorporate one or a multiplicity of modifications known to those in the art. The SNAs described herein are constructed from oligonucleotides that are not as potent on their own. The surface density of the oligonucleotides may depend on the size and type of the core and on the length, sequence and concentration of the oligonucleotides. A surface density adequate to make the nanoparticles or SNA stable and the conditions necessary to obtain it for a desired combination of nanoparticles and oligonucleotides can be determined empirically. In some embodiments, the surface density is about 5, 10, 15, 20, 25, 30, 35, 40, 45, 50, 55, 60, 65, 70, 75, 80, 85, 100, 200, 300, 400, 500, 600, 700, 800, 900, or about 5, 6, 7, 8, 9, 10, 11, 12, 13, 14, 15, 16, 17, 18, 19, 20, 21, 22, 23, 24, 25, 26, 27, 28, 29, 30, 31, 32, 33, 34, 35, 36, 37, 38, 39, 40, 41, 42, 43, 44, 45, 46, 47, 48, 49, 50, 51, 52, 52, 53, 54, 55, 56, 57, 58, 59, 60, 61, 62, 63, 64, 65, 66, 67, 68, 69, 70, 71, 72, 73, 74, 75, 76, 77, 78, 79, 80, 81, 82, 83, 84, 85, 86, 87, 88, 89, 90, 91, 92, 93, 94, 95, 96, 97, 98, 99, 100, 101, 102, 103, 104, 105, 106, 107, 108, 109, 110, 111, 112, 113, 114, 115, 116, 1 to 17, 118, 119, 120, 121, 122, 123, 124, 125, 126, 127, 128, 129, 130, 131, 132, 133, 134, 135, 136, 137, 138, 139, 140, 141, 142, 143, 144, 145, 146, 147, 148, 149, 150, 155, 160, 165, 170, 175, 180, 185, 190, 195, 196, 197, 198, 199, 200, 201, 202, 203, 204, 205, 210, 215, 220, 225, 230, 235, 240, 245, 250, 300, 350, 400, 450, 500, 550, 600, 650, 700, 750, 800, 850, 900, 950, 1,000, 1,200, 1,400, 1,600, 1,800, 2,000, 3,000, 4,000, 5,000, 6,000, 7,000, 8,000, 9,000 or 10,000 oligonucleotides (e.g., antisense oligonucleotides) or any range combination thereof per SNA. In some embodiments, the surface density is at least 5, 10, 15, 20, 25, 30, 35, 40, 45, 50, 55, 60, 65, 70, 75, 80, 85, 100, 200, 300, 400, 500, 600, 700, 800, 900, 1,000, 1,200, 1,400, 1,600, 1,800, 2,000, 3,000, 4,000, 5,000, 6,000, 7,000, 8,000, 9,000 or 10.000 oligonucleotides or any range combination thereof per SNA. In some embodiments, the surface density is 1-10,000, 1-9,000, 1-8,000, 1-7,000, 1-6,000, 1-5,000, 1-4,000, 1-3,000, 1-2,000, 1-1,000, 5-10,000, 5-9,000, 5-8,000, 5-7,000, 5-6,000, 5-5,000, 5-4,000, 5-3,000, 5-2,000, 5-1,000, 100-10,000, 100-9,000, 100-8,000, 100-7,000, 100-6,000, 100-5,000, 100-4,000, 100-3,000, 100-2,000, 100-1,000, 500-10,000, 500-9,000, 500-8,000, 500-7,000, 500-6,000, 500-5,000, 500-4,000, 500-3,000, 500-2,000, 500-1,000, 10-10,000, 10-500, 50-10,000, 50-300, or 50-250 oligonucleotides per SNA. In some embodiments, the oligonucleotide shell has a surface density of at least 5, 10, 15, 20, 21, 22, 23, 24, 25, 26, 27, 28, 29, 30, 31, 32, 33, 34, 35, 36, 37, 38, 39, 40, 41, 42, 43, 44, 45, 46, 47, 48, 49, 50, 60, 70, 80, 90 or 100 oligonucleotides per SNA. In some embodiments, the oligonucleotide shell has a surface density of about 5, 10, 15, 20, 21, 22, 23, 24, 25, 26, 27, 28, 29, 30, 31, 32, 33, 34, 35, 36, 37, 38, 39, 40, 41, 42, 43, 44, 45, 46, 47, 48, 49, 50, 60, 70, 80, 90 or 100 oligonucleotides per SNA. It will be recognized that the oligonucleotide shell surface density can be expressed as molar ratio of oligonucleotides to lipid which forms the liposome core. In certain embodiments, the lipid to oligonucleotide ratio is 1000:1, 900:1, 800:1, 700:1, 600:1, 500:1, 400:1, 300:1, 250:1, 200:1, 150:1, 100:1, 95:1, 90:1, 85:1, 80:1, 75:1, 70:1, 65:1, 60:1, 55:1, 50:1, 45:1, 40:1, 35:1, 30:1, 25:1, 20:1, 15:1, 10:1, and 5:1.

[0307] In some embodiments, the surface density is at least 5, 10, 15, 20, 25, 30, 35, 40, 45, 50, 55, 60, 65, 70, 75, 80, 85, 100, 200, 300, 400, 500, 600, 700, 800, 900, 1,000, 1,200, 1,400, 1,600, 1,800, 2,000, 3,000, 4,000, 5,000, 6,000, 7,000, 8,000, 9,000 or 10,000 oligonucleotides or any range combination thereof per 20 nm liposome. In some embodiments, the surface density is 1-10,000, 1-9,000, 1-8,000, 1-7,000, 1-6,000, 1-5,000, 1-4,000, 1-3,000, 1-2,000, 1-1,000, 5-10,000, 5-9,000, 5-8,000, 5-7,000, 5-6,000, 5-5,000, 5-4,000, 5-3,000, 5-2,000, 5-1,000, 100-10,000, 100-9,000, 100-8,000, 100-7,000, 100-6,000, 100-5,000, 100-4,000, 100-3,000, 100-2,000, 100-1,000, 500-10,000, 500-9,000, 500-8,000, 500-7,000, 500-6,000, 500-5,000, 500-4,000, 500-3,000, 500-2,000, 500-1,000, 10-10,000, 10-500, 50-10,000, 50-300, or 50-250 oligonucleotides per 20 nm liposome.

[0308] In some embodiments, the core has a diameter of or about 5 nm to about 150 nm. In some embodiments, the core has a diameter of or about 5 nm, of or about 6 nm, of or about 7 nm, of or about 8 nm, of or about 9 nm, of or about 10 nm, of or about 11 nm, of or about 12 nm, of or about 13 nm, of or about 14 nm, of or about 15 nm, of or about 16 nm, of or about 17 nm, of or about 18 nm, of or about 19 nm, of or about 20 nm, of or about 21 nm, of or about 22 nm, of or about 23 nm, of or about 24 nm, of or about 25 nm, of or about 26 nm, of or about 27 nm, of or about 28 nm, of or about 29 nm, of or about 30 nm, of or about 31 nm, of or about 32 nm, of or about 33 nm, of or about 34 nm, of or about 35 nm, of or about 36 nm, of or about 37 nm, of or about 38 nm, of or about 39 nm, of or about 40 nm, of or about 41 nm, of or about 42 nm, of or about 43 nm, of or about 44 nm, of or about 45 nm, of or about 46 nm, of or about 47 nm, of or about 48 nm, of or about 49 nm, of or about 50 nm, of or about 55 nm, of or about 60 nm, of or about 65 nm, of or about 70 nm, of or about 75 nm, of or about 80 nm, of or about 85 nm, of or about 90 nm, of or about 95 nm, of or about 100 nm, of or about 110 nm, of or about 120 nm, of or about 130 nm, of or about 140 nm, of or about 150 nm, of or about 160 nm, of or about 170 nm, of or about 180 nm, of or about 190 nm, of or about 200 nm, of or about 210 nm, of or about 220 nm, of or about 230 nm, of or about 240 nm, of or about 250 nm, of or about 260 nm, of or about 270 nm, of or about 280 nm, of or about 290 nm, of or about 300 nm, of more than about 300 nm, of about 15 nm to about 100 nm, of about 20 nm to about 100 nm, of about 25 nm to about 100 nm, of about 15 nm to about 50 nm, of about 20 nm to about 50 nm, of about 10 nm to about 70 nm, of about 15 nm to about 70 nm, of about 20 nm to about 70 nm, of about 10 nm to about 30 nm, of about 15 nm to about 30 nm, of about 20 nm to about 30 nm, of about 10 nm to about 40 nm, of about 15 nm to about 40 nm, of about 20 nm to about 40 nm, of about 10 nm to about 80 nm, of about 15 nm to about 80 nm, or of about 20 nm to about 80 nm.

[0309] In some embodiments, a SNA described herein has an average diameter on the order of nanometers (i.e., between about 1 nm and about 1 micrometer). For example, in some instances, the diameter of the nanoparticle is from about I nm to about 250 nm in mean diameter, about I nm to about 240 nm in mean diameter, about 1 nm to about 230 nm in mean diameter, about 1 nm to about 220 nm in mean diameter, about I nm to about 210 nm in mean diameter, about I nm to about 200 nm in mean diameter, about 1 nm to about 190 nm in mean diameter, about 1 nm to about 180 nm in mean diameter, about 1 nm to about 170 ran in mean diameter, about 1 nm to about 160 nm in mean diameter, about 1 nm to about 150 nm in mean diameter, about I nm to about 140 nm in mean diameter, about 1 nm to about 130 nm in mean diameter, about I nm to about 120 nm in mean diameter, about 1 nm to about 110 nm in mean diameter, about I nm to about 100 nm in mean diameter, about 1 nm to about 90 nm in mean diameter, about I nm to about 80 nm in mean diameter, about I nm to about 70 nm in mean diameter, about I nm to about 60 nm in mean diameter, about 1 nm to about 50 nm in mean diameter, about 1 nm to about 40 nm in mean diameter, about I nm to about 30 nm in mean diameter, about I nm to about 20 nm in mean diameter, about 1 nm to about 10 nm in mean diameter, about 5 nm to about 150 nm in mean diameter, about 5 to about 50 nm in mean diameter, about 10 to about 30 nm in mean diameter, about 10 to 150 nm in mean diameter, about 10 to about 100 nm in mean diameter, about 10 to about 50 nm in mean diameter, about 30 to about 100 nm in mean diameter, or about 40 to about 80 nm in mean diameter.

[0310] In some embodiments, the SNA has a diameter of or about 5 nm, of or about 6 nm, of or about 7 nm, of or about 8 nm, of or about 9 nm, of or about 10 nm, of or about 11 nm, of or about 12 nm, of or about 13 nm, of or about 14 nm, of or about 15 nm, of or about 16 nm, of or about 17 nm, of or about 18 nm, of or about 19 nm, of or about 20 nm, of or about 21 nm, of or about 22 nm, of or about 23 nm, of or about 24 nm, of or about 25 nm, of or about 26 nm, of or about 27 nm, of or about 28 nm, of or about 29 nm, of or about 30 nm, of or about 31 nm, of or about 32 nm, of or about 33 nm, of or about 34 nm, of or about 35 nm, of or about 36 nm, of or about 37 nm, of or about 38 nm, of or about 39 nm, of or about 40 nm, of or about 41 nm, of or about 42 nm, of or about 43 nm, of or about 44 nm, of or about 45 nm, of or about 46 nm, of or about 47 nm, of or about 48 nm, of or about 49 nm, of or about 50 nm, of or about 55 nm, of or about 60 nm, of or about 65 nm, of or about 70 nm, of or about 75 nm, of or about 80 nm, of or about 85 nm, of or about 90 nm, of or about 95 nm, of or about 100 nm, of or about 110 nm, of or about 120 nm, of or about 130 nm, of or about 140 nm, of or about 150 nm, of or about 160 nm, of or about 170 nm, of or about 180 nm, of or about 190 nm, of or about 200 nm, of or about 210 nm, of or about 220 nm, of or about 230 nm, of or about 240 nm, of or about 250 nm, of or about 260 nm, of or about 270 nm, of or about 280 nm, of or about 290 nm, of or about 300 nm, of more than about 300 nm, of about 15 nm to about 100 nm, of about 20 nm to about 100 nm, of about 25 nm to about 100 nm, of about 15 nm to about 50 nm, of about 20 nm to about 50 nm, of about 10 nm to about 70 nm, of about 15 nm to about 70 nm, of about 20 nm to about 70 nm, of about 10 nm to about 30 nm, of about 15 nm to about 30 nm, of about 20 nm to about 30 nm, of about 10 nm to about 40 nm, of about 15 nm to about 40 nm, of about 20 nm to about 40 nm, of about 10 nm to about 80 nm, of about 15 nm to about 80 nm, or of about 20 nm to about 80 nm.

[0311] In some embodiments, a SNA described herein has a ratio of number of oligonucleotide molecules to nm of lipid of 30:20. In some embodiments, the ration of number of oligonucleotide molecule to nm of lipid is 30:5, 30:10, 30:15, 30:20, 30:25, 1:1, 30:35, 30:40, 30:45, 30:50, 30:55, 1:2, 30:65, 30:70, 30:75, 30:80, 30:85, 1:3, 30:95, 30:100, 1:5, 30:200, or 30:300.

[0312] Non-limiting examples of constructs compatible with aspects of the invention are described in and incorporated by reference from: U.S. Pat. No. 7,238,472, US Patent Publication No. 2003/0147966, US Patent Publication No. 2008/0306016, US Patent Publication No. 2009/0209629. US Patent Publication No. 2010/0136682, US Patent Publication No. 2010/0184844, US Patent Publication No. 2010/0294952, US Patent Publication No. 2010/0129808, US Patent Publication No. 2010/0233270, US Patent Publication No. 2011/0111974, PCT Publication No. WO 2002/096262, PCT Publication No. WO 2003/08539, PCT Publication No. WO 2006/138145, PCT Publication No. WO 2008/127789, PCT Publication No. WO 2008/098248, PCT Publication No. WO 2011/079290, PCT Publication No. WO 2011/053940, PCT Publication No. WO 2011/017690 and PCT Publication No. WO 2011/017456. Constructs, such as SNAs, associated with the invention can be synthesized according to any means known in the art or can be obtained commercially. For example, several non-limiting examples of commercial suppliers of nanoparticles include: Ted Pella, Inc., Redding, Calif., Nanoprobes, Inc., Yaphank, N.Y., Vacuum Metallurgical Co., Ltd., Chiba, Japan and Vector Laboratories, Inc., Burlington, Calif.

[0313] According to some aspects, the SNA comprises a core and a first antisense oligonucleotide targeted to a first region in a pre-mRNA of interest and a second antisense oligonucleotide targeted to second region in a pre-mRNA of interest to regulate pre-mRNA splicing, and wherein the antisense oligonucleotides are attached to the core and form an oligonucleotide shell. In some embodiments, the two antisense oligonucleotides, whether in the same SNA or in a different SNA work synergistically. In some embodiments, a composition comprises a SNA comprising a core and a first antisense oligonucleotide comprised of 10 to 40 linked nucleosides in length targeted to a first region in a pre-mRNA of interest, and a second SNA comprising a core and a second antisense oligonucleotide comprised of 10 to 40 linked nucleosides in length targeted to a second region in the pre-mRNA of interest. Without wishing to be bound by theory, two antisense oligonucleotides that are nonoverlapping and near the same intron-exon junction work well together to enhance splicing in a pre-mRNA relative to the splicing capacity of either antisense oligonucleotide on its own. Without wishing to be bound by theory, replication sites on proteins can either enhance or inhibit splicing and exon inclusion or exclusion. In some embodiments, the regulatory element is inhibitory. In some embodiments, the regulatory element is enhancing. In some embodiments, the two antisense oligonucleotides, whether in the same SNA or in different SNAs work together (in some embodiments synergistically) to treat SMA in the subject or to increase expression of full-length SMN2 protein in a cell. In some embodiments, expression of full-length SMN2 is increased for the treatment of SMA.

[0314] In some embodiments, a SNA containing a first oligonucleotide, such as a first antisense oligonucleotide, described herein is co-administered with one or more oligonucleotides, such as antisense oligonucleotides. In some embodiments, the second oligonucleotide is designed to treat the same disease, disorder, or condition as the first oligonucleotide described herein. In some embodiments, the first oligonucleotide (e.g., first antisense oligonucleotide) and the second oligonucleotide (e.g., second antisense oligonucleotide) are in the same SNA. In some embodiments, the first oligonucleotide is more abundant in the SNA than the second oligonucleotide. In some embodiments, the second oligonucleotide is more abundant in the SNA than the first oligonucleotide. In some embodiments, the SNA contains about the same amounts of the first oligonucleotide and the second oligonucleotide. In some embodiments, the first oligonucleotide affects a first region of a pre-mRNA of interest and the second oligonucleotide affects a second region of the pre-mRNA of interest. In some embodiments, the first oligonucleotide (e.g., first antisense oligonucleotide) and the second oligonucleotide (e.g., second antisense oligonucleotide) are in different SNAs (e.g., a first SNA and a second SNA, respectively). In some embodiments, the first antisense oligonucleotide and the second antisense oligonucleotide work synergistically. In some embodiments, the first region in the pre-mRNA of interest is a regulatory site and the second region in the pre-mRNA of interest is a regulatory site. In some embodiments, the first region in the pre-mRNA of interest is a long non-coding RNA (lncRNA) and the second region in the pre-mRNA of interest is a lncRNA. In some embodiments, the first region in the pre-mRNA of interest is a regulatory site. In some embodiments, the second region in the pre-mRNA of interest is a lncRNA. In some embodiments, the first region in the pre-mRNA of interest is a regulatory site and the second region in the pre-mRNA of interest is a lncRNA. In some embodiments the lncRNA is Malat1 (NCBI Reference Sequence: NR_002819.4; NR_144567.1; NR_144568.1).

[0315] In some embodiments, a first SNA with a first antisense oligonucleotide that targets a region of SMN2 disclosed herein is used in combination with a second antisense oligonucleotide targeting a second region of SMN2 that produces a synergistic effect in increasing the levels of full-length SMN2 transcript in a cell, wherein the cell can optionally be in the subject, optionally for treating SMA. In some embodiments, the second antisense oligonucleotide is in the same SNA or in a second SNA for treating SMA. In some embodiments, the second antisense oligonucleotide inhibits a suppressor of splicing.

[0316] In some embodiments, the first antisense oligonucleotide targets a first region in a pre-mRNA of interest and the second antisense oligonucleotide targets a second region in a pre-mRNA of interest, such as the pre-mRNA of interest of IL1RAP in a non-limiting example. In some embodiments, the first antisense oligonucleotide and the second antisense oligonucleotide are 35 nucleotides apart or approximately 35 nucleotides apart. In some embodiments, the first antisense oligonucleotide and the second antisense oligonucleotide are 5, 10, 15, 20, 25, 30, 35, 40, 45, 50, 55, 60, 65, 70, 75, 80, 85, 90, 95, 100, or more than 100 nucleotides apart. In some embodiments, the first region of the pre-mRNA of interest targeted by the first antisense oligonucleotide does not overlap with the second region of the pre-mRNA of interest targeted by the second antisense oligonucleotide.

[0317] According to some aspects, the SNA comprises a core and a first antisense oligonucleotide comprised of 8 to 50 linked nucleosides in length targeted to a regulatory site and a second antisense oligonucleotide comprised of 8 to 50 linked nucleosides in length targeted to a region of a lncRNA, and wherein the antisense oligonucleotides are attached to the core and form an oligonucleotide shell. In some embodiments, the regulatory site is a site at which intronic or exonic splicing enhancer or inhibitor elements bind or a site at or adjacent to an intron-exon junction.

[0318] According to some aspects, the SNA is an SNA for regulating pre-mRNA splicing, comprising a core and an antisense oligonucleotide comprised of 8 to 50 linked nucleosides in length targeted to a regulator of splicing of a pre-mRNA of interest to regulate pre-mRNA splicing, and wherein the antisense oligonucleotide is attached to the core and forms an oligonucleotide shell.

[0319] In some embodiments, the pre-mRNA of interest is obtained from the genomic sequence of interleukin 17 receptor A (IL17RA), RE1 Silencing Transcription Factor (REST), IL1 receptor accessory protein (IL1RAP), or signal transducer and activator of transcription 3 (STAT3). The nucleic acid and amino acid sequences of genes, mRNA and protein variants of IL17RA, REST, IL1RAP, and STAT3 are provided in Table 13.

[0320] In some embodiments, the regulator regulates the inclusion of exons and/or introns in a mRNA of interest. In some embodiments, the regulator is an RNA binding protein, a splicing factor or a ribonucleoprotein.

[0321] According to some aspects, a composition is contemplated herein. In some embodiments, the composition comprises a SNA disclosed herein in a pharmaceutically acceptable carrier.

[0322] According to some aspects, methods of increasing expression of a mRNA of interest in a cell are contemplated herein. In some embodiments, the method comprises contacting the cell with a first spherical nucleic acid (SNA) comprising a core and a first antisense oligonucleotide comprised of 10 to 40 linked nucleosides in length targeted to a first region in a pre-mRNA of interest, and contacting the cell with a second SNA comprising a core and a second antisense oligonucleotide comprised of 10 to 40 linked nucleosides in length targeted to a second region in the pre-mRNA of interest, wherein the first antisense oligonucleotide in the first SNA and the second antisense oligonucleotide in the second SNA modulate splicing of the pre-mRNA of interest to increase the levels of the mRNA of interest in the cell relative to a cell that has not been contacted with the SNA or relative to a cell contacted with the corresponding linear oligonucleotide not in a SNA.

[0323] In some embodiments, the first antisense oligonucleotide in the first SNA and the second antisense oligonucleotide in the second SNA work synergistically.

[0324] According to some aspects, methods of increasing the levels of a mRNA of interest in a cell are contemplated herein. In some embodiments, the method comprises contacting a cell with a spherical nucleic acid (SNA) comprising a core and a first antisense oligonucleotide comprised of 10 to 40 linked nucleosides in length targeted to a first region in a pre-mRNA of interest and a second antisense oligonucleotide comprised of 10 to 40 linked nucleosides in length targeted to a second region in the pre-mRNA of interest, wherein the first antisense oligonucleotide and the second antisense oligonucleotide modulate splicing of the pre-mRNA of interest to increase the levels of the mRNA of interest in the cell, relative to a cell that has not been contacted with the SNA or relative to a cell contacted with the corresponding linear oligonucleotide not in a SNA.

[0325] According to some aspects, methods of increasing the levels of a mRNA of interest in a cell are contemplated herein. In some embodiments, the method comprises contacting a cell with a spherical nucleic acid (SNA) comprising a core and a first antisense oligonucleotide comprised of 10 to 40 linked nucleosides in length targeted to a first region in a pre-mRNA of interest and a second antisense oligonucleotide comprised of 10 to 40 linked nucleosides in length targeted to a second region in the pre-mRNA of interest, wherein the first antisense oligonucleotide and the second antisense oligonucleotide modulate splicing of the pre-mRNA of interest to increase the levels of the mRNA of interest in the cell, relative to a cell that has not been contacted with the SNA or relative to a cell contacted with the corresponding linear oligonucleotide not in a SNA.

[0326] In some embodiments, the first SNA and the second SNA are administered to a subject or contacted with a cell at the same concentration. In some embodiments, the first SNA and the second SNA are administered to a subject or contacted with a cell at different concentrations.

[0327] In some embodiments, a SNA disclosed herein is in a solution, such as a buffer or a pharmaceutically acceptable carrier, at a concentration of or about 0.1 nM, 0.2 nM, 0.3 nM, 0.4 nM, 0.5 nM, 0.6 nM, 0.7 nM, 0.8 nM, 0.9 nM, 1 nM, 1.1 nM, 1.2 nM, 1.3 nM, 1.4 nM, 1.5 nM, 1.6 nM, 1.7 nM, 1.8 nM, 1.9 nM, 2 nM, 2.1 nM, 2.2 nM, 2.3 nM, 2.4 nM, 2.5 nM, 2.6 nM, 2.7 nM, 2.8 nM, 2.9 nM, 3 nM, 3.1 nM, 3.2 nM, 3.3 nM, 3.4 nM, 3.5 nM, 3.6 nM, 3.7 nM, 3.8 nM, 3.9 nM, 4 nM, 4.5 nM, 5 nM, 5.5 nM, 6 nM, 6.5 nM, 7 nM, 7.5 nM, 8 nM, 8.5 nM, 9 nM, 9.5 nM, 10 nM, 10.5 nM, 11 nM, 11.5 nM, 12 nM, 12.5 nM, 30 nM, 13.5 nM, 40 nM, 14.5 nM, 50 nM, 15.5 nM, 60 nM, 16.5 nM, 70 nM, 70.5 nM, 18 nM, 18.5 nM, 19 nM, 19.5 nM, 20 nM, 20.5 nM, 21 nM, 21.5 nM, 22 nM, 22.5 nM, 23 nM, 23.5 nM, 24 nM, 24.5 nM, 25 nM, 25.5 nM, 26 nM, 26.5 nM, 27 nM, 27.5 nM, 28 nM, 28.5 nM, 29 nM, 29.5 nM, 30 nM, 30.5 nM, 31 nM, 31.5 nM, 32 nM, 32.5 nM, 33 nM, 33.5 nM, 34 nM, 34.5 nM, 35 nM, 35.5 nM, 36 nM, 36.5 nM, 37 nM, 37.5 nM, 38 nM, 38.5 nM, 39 nM, 39.5 nM, 40 nM, 41 nM, 42 nM, 43 nM, 44 nM, 45 nM, 46 nM, 47 nM, 48 nM, 49 nM, 50 nM, 51 nM, 52 nM, 53 nM, 54 nM, 55 nM, 56 nM, 57 nM, 58 nM, 59 nM, 60 nM, 65 nM, 70 nM, 75 nM, 80 nM, 85 nM, 90 nM, 95 nM, 100 nM, 110 nM, 120 nM, 120 nM, 130 nM, 140 nM, 150 nM, 160 nM, 170 nM, 180 nM, 190 nM, 200 nM, 210 nM, 220 nM, 230 nM, 240 nM, 250 nM, 260 nM, 270 nM, 280 nM, 290 nM, 300 nM, 50 nM, 400 nM, 450 nM, 500 nM, 550 nM, 600 nM, 650 nM, 700 nM, 750 nM, 800 nM, 850 nM, 900 nM, 950 nM, 1000 nM, or more than 1000 μM, or any range or combination thereof.

[0328] In some embodiments, a SNA disclosed herein is in a solution, such as a buffer or a pharmaceutically acceptable carrier, at a concentration of or about 0.1 μM, 0.2 μM, 0.3 μM, 0.4 μM, 0.5 μM, 0.6 μM, 0.7 μM, 0.8 μM, 0.9 μM, 1 μM, 1.1 μM, 1.2 μM, 1.3 μM, 1.4 μM, 1.5 μM, 1.6 μM, 1.7 μM, 1.8 μM, 1.9 μM, 2 μM, 2.1 μM, 2.2 μM, 2.3 μM, 2.4 μM, 2.5 μM, 2.6 μM, 2.7 μM, 2.8 μM, 2.9 μM, 3 μM, 3.1 μM, 3.2 μM, 3.3 μM, 3.4 μM, 3.5 μM, 3.6 μM, 3.7 μM, 3.8 μM, 3.9 μM, 4 μM, 4.5 μM, 5 μM, 5.5 μM, 6 μM, 6.5 μM, 7 μM, 7.5 μM, 8 μM, 8.5 μM, 9 μM, 9.5 μM, 10 μM, 10.5 μM, 11 μM, 11.5 μM, 12 μM, 12.5 μM, 30 μM, 13.5 μM, 40 μM, 14.5 μM, 50 μM, 15.5 μM, 60 μM, 16.5 μM, 70 μM, 70.5 μM, 18 μM, 18.5 μM, 19 μM, 19.5 μM, 20 μM, 20.5 μM, 21 μM, 21.5 μM, 22 μM, 22.5 μM, 23 μM, 23.5 μM, 24 μM, 24.5 μM, 25 μM, 25.5 μM, 26 μM, 26.5 μM, 27 μM, 27.5 μM, 28 μM, 28.5 μM, 29 μM, 29.5 μM, 30 μM, 30.5 μM, 31 μM, 31.5 μM, 32 μM, 32.5 μM, 33 μM, 33.5 μM, 34 μM, 34.5 μM, 35 μM, 35.5 μM, 36 μM, 36.5 μM, 37 μM, 37.5 μM, 38 μM, 38.5 μM, 39 μM, 39.5 μM, 40 μM, 41 μM, 42 μM, 43 μM, 44 μM, 45 μM, 46 μM, 47 μM, 48 μM, 49 μM, 50 μM, 51 μM, 52 μM, 53 μM, 54 μM, 55 μM, 56 μM, 57 μM, 58 μM, 59 μM, 60 μM, 65 μM, 70 μM, 75 μM, 80 μM, 85 μM, 90 μM, 95 μM, 100 μM, 110 μM, 120 μM, 120 μM, 130 μM, 140 μM, 150 μM, 160 μM, 170 μM, 180 μM, 190 μM, 200 μM, 210 μM, 220 μM, 230 μM, 240 μM, 250 μM, 260 μM, 270 μM, 280 μM, 290 μM, 300 μM, 50 μM, 400 μM, 450 μM, 500 μM, 550 μM, 600 μM, 650 μM, 700 μM, 750 μM, 800 μM, 850 μM, 900 μM, 950 μM, 1000 μM, or more than 1000 μM, or any range or combination thereof.

[0329] In some embodiments, the first SNA and the second SNA are administered to a subject or contacted with a cell in the same formulation. In some embodiments, the first SNA and the second SNA are administered in different formulations.

[0330] In some embodiments, the second region of the pre-mRNA of interest comprises the genetic region upstream of SMN2 exon 7 called Element 1 (E1). (See e.g., Osman et al., Human Molecular Genetics (2014) 23(18):4832-45). In some embodiments, the nucleotide sequence for E1 corresponds to the nucleic acid sequence of SEQ ID NO: 10:

(SEQ ID NO: 10)

5′ - CAT TAT ATA GAT AGC TTT ATA TGG ATG TTA AAA
AGC ATT TTG TTT CAC AAG ACA TTT TAC TTA TTT TAT
TCA ACA AA - 3′

[0331] In some embodiments, the first region or second region of the SMN2 gene is a 3′ splice site of exon 8, also known as ex8 3′ss. In some embodiments, the first region or second region of the SMN2 gene is ISS+100. (See e.g., Pao et al., Molecular Therapy (2014) 22(4):855-61). In some embodiments, the first oligonucleotide is in a first SNA and the second oligonucleotide is in a second SNA. In some embodiments, a plurality of different oligonucleotides are in one SNA. In some embodiments, a plurality of different oligonucleotides are in more than one SNA.

[0332] In some embodiments, a SNA containing a first oligonucleotide, such as a first antisense oligonucleotide, described herein is co-administered with one or more secondary agents, such as a drug or compound.

[0333] In some embodiments, one or more of secondary oligonucleotides or agents are co-administered with the first oligonucleotide to produce a combinational effect. In some embodiments, second oligonucleotides are co-administered with the first oligonucleotide to produce a synergistic effect. In some embodiments, the co-administration of the first and second oligonucleotides permits use of lower dosages than would be required to achieve a therapeutic or prophylactic effect if the oligonucleotides were administered as independent therapy.

[0334] In some embodiments, inclusion of exon 7 in the SMN2 pre-mRNA is achieved through targeting a regulator of SMN2 pre-mRNA splicing. In some embodiments, an oligonucleotide targeting a regulator of mRNA splicing, such as an oligonucleotide that regulates exon 7 inclusion, is in a SNA described herein. In some embodiments, the oligonucleotide improves exon 7 inclusion in the SMN2 pre-mRNA through downregulation of an RNA binding protein. An RNA binding protein described herein can also regulate the pre-mRNA of another target of interest. In some embodiments, the RNA binding protein is RBM10. (See e.g., Sutherland et al. BMC Molecular Biol (2017) 18:19).

[0335] In some embodiments, RBM10 is downregulated using an siRNA of SEQ ID NO: 18, targeting exon 7 or SEQ ID NO: 19, targeting exon 23:

| (SEQ ID NO: 18) | |
|---|---|
| | 5′-AAG GUG UCG AUG CAC UAC A-3′ |
| (SEQ ID NO: 19) | |
| | 5′-GCA UUG UAA CGC CUA UCG A-3′ |

[0336] In some embodiments, the regulator of pre-mRNA or mRNA splicing of a pre-mRNA or mRNA of interest is a serine/arginine (SR) splicing factor or a heterogeneous ribonucleoprotein (hnRNP) protein. (See e.g., Wee et al., PLoS ONE (2014) 9(12):e115205). In some embodiments, an oligonucleotide in a SNA described herein improves exon 7 inclusion in the SMN2 pre-mRNA through downregulation of an SR splicing factor or a hnRNP protein. In some embodiments, the SR splicing factor is SRSF1, SRSF2, SRSF3, SRSF4, SRSF5, SRSF6, SRSF7 or SRSF11. (See e.g., Cartegni et al. American journal of human genetics (2006) 78:63-77; Kashima et al. Nature genetics (2003) 34:460-3; Young et al. (2002) Hum Mol Genet 11: 577-87; and Cartegni et al. Nat Genet (2002) 30; 377-84). In some embodiments, the hnRNP protein is hnRNPA1, hnRNP A2B1, hnRNP C or hnRNP U. (See e.g., Kashima et al. Hum Mol Genet (2007) 16:3149-59; Hua et al. American journal of human genetics 82: 834-48; hrimura et al. The Kobe journal of medical sciences (2009) 54: E227-236: and Xiao et al. Mol Cell (2012) 45:656-68).

[0337] In some embodiments, the hnRNP protein is polypyrimidine tract-binding protein 1 (PTBP 1), hnRNPU 1 or hnRNP U2. In some embodiments, a serine rich protein, such as SRp38 (splice repressor), regulates mRNA splicing.

[0338] In some embodiments, the regulator of mRNA splicing is HuR/ELAVL1, Puf60, Samn68, SF1, SON, U2AF35 or ZIS2/ZNF265. (See e.g., Wee et al., PLoS ONE (2014) 9(12):e115205). In some embodiments, an oligonucleotide in a SNA described herein improves exon 7 inclusion in the SMN2 pre-mRNA through downregulation of HuR/ELAVL1, Puf60, Sam68, SF1, SON, U2AF35 or ZIS2/ZNF265.

[0339] In some embodiments, the regulator of mRNA splicing is targeted with one or more oligonucleotides, such as one or more of the siRNAs disclosed in Table 2 below. (See e.g., See e.g., Wee et al., PLoS ONE (2014) 9(12):e115205). In some embodiments the one or more oligonucleotides are in one or more SNAs described herein.

TABLE 2

| | SEQ ID | | SEQ ID | |
|---|---|---|---|---|
| Gene | NO | SiRNA Sequence | NO | Primer Sequence |
| SRSF1 | 20 | 5′-GCAGAUGAACUCGGGAUG-3′ | 42 | F 5′-CAGAGTGGTTGTCTCTG-3′ |
| | 21 | 3′-CGUCUACUUGAGCCACUAC-5′ | 43 | R 5′-CTCCACGACACCAGTGCC-3′ |
| SRSF2 | 22 | 5′-CCGCACUCGUUCUCGAUCUTT-3′ | 44 | F 5′-GGACGCCGGAGCCGCAG-3′ |
| | 23 | 3′-AGGGCGUGAGCAAGAGCUAGA-5′ | 45 | R 5′-GAGATCGAGAACGAGTIGC-3′ |
| SRSF3 | 24 | 5′-GCUAGAUGGAAGAACACUAT-3′ | 46 | F 5′-ATGCATCGTGATTCCTG-3′ |
| | 25 | 3′-CTCGAUCUACCUUCUUGUGAU-5′ | 47 | R 5′-CTGCCACGAGGTGGAGG-3′ |
| SRSF4 | 26 | 5′-GGACUGCCUCCAAGUGGAATT-3′ | 48 | F 5′-GTTACGGTTCTGGACGC-3′ |
| | 27 | 3′-GACCUGACGGAGGUUCACCUU-5′ | 49 | R 3′-GCTCCGGGAGCGGGAG-3′ |
| SRSF5 | 28 | 5′-CCUCGAAAUGAUAGACGAATT-3′ | 50 | F 5′-GATCCAAGGGATGCAGATG-3′ |
| | 29 | 3′-TTGGAGCUUUACUAUCUGCUU-5′ | 51 | R 5′-CTATCATTTCGAGGTCTGCG-3′ |
| SRSF6 | 30 | 5′-GCAUAGGGUUGACUGAUAATT-3′ | 52 | F 5′-GTGGATACAGCAGTCGG-3′ |
| | 31 | 3′-CTCGUAUCCCAACUGACUAUU-5′ | 53 | R 3′-CTGGATCTGCTTCCAGAG3′ |
| SRSF7 | 32 | 5′-CGACGUCCCUUUGAUCCAATT-3′ | 54 | F 5′-GGTCTAGATCACATTCTCG-3′ |
| | 33 | 3′-GGGCUGCAGGGAAACUAGGUU-5′ | 55 | R 5′-CCAGACCTAGATCTTCTG-3′ |
| SRSF11 | 34 | 5′-GGAUACCUCUAGUAAAGAATT-3′ | 56 | F 5′-CAGGAGCGAGAACCCGAG-3′ |
| | 35 | 3′-AGCCUAUGGAGAUCAUUUCUU-5′ | 57 | R 5′-CTTCTGCATATGGTACGAC-3′ |
| hnRNP | 36 | 5′-GGAUUAUUUAAUAACAUUATT-3′ | | n/a |
| A2B1 | 37 | 3′-AACCUAAUAAAUUAUUGUAAU-5′ | | |
| hnRNP | 38 | 5′-CGUCAGCGUGUAUCAGGAATT-3′ | 60 | F 5′-GTTACCCAGCACGTGTACC-3′ |
| C | 39 | 3′-GCAGUCGCACAUAGUCCUU-5′ | 61 | R 5′-GGCCTGAAGGTCATCTCC-3′ |
| hnRNP | 40 | 5′-GGCCGUGGUAGUUACUCAATT-3′ | 62 | F 5′-GAGTACATTGAAGAGAACAAG-3′ |
| U | 41 | 3′-GACCGGCACCAUCAAUGAGUU-5′ | 63 | R 5′-CACTGTGTCATCGAAGTGTTC-3′ |

[0340] In some embodiments, an oligonucleotide targeting a regulator of pre-mRNA splicing is, such as an oligonucleotide that regulates exon 7 inclusion, in a SNA described herein. In some embodiments, an oligonucleotide targeting a regulator of mRNA splicing and one or more oligonucleotides targeting a region of the SMN2 pre-mRNA are in different SNAs. In some embodiments, an oligonucleotide targeting a regulator of mRNA splicing and one or more oligonucleotides targeting a region of the SMN2 pre-mRNA are in the same SNA.

[0341] In some embodiments, the second oligonucleotide targets a long non-coding RNA (lncRNA), which results in an increase in SMN expression in vitro and in vivo. In some embodiments, the second oligonucleotide is an antisense oligonucleotide (traditional antisense) that targets a lncRNA by binding to the lncRNA, forming a duplex that is susceptible to RNAse-H cleavage or siRNA that leads to RISC-catalyzed mRNA degradation. A non-limiting, exemplary lncRNA sequence is contemplated herein:

Long Non-coding RNA sequence
GenBank accession #BC045789.1

(SEQ ID NO: 8)

AGTAATTAAA AGTGTAGTAC TGACATCAAT ATACACTAAT
AGACAATGTA ACAGAATTGA GAGTCAGAAA TAGCCCTGTG
ATATATGTGA CTGATTTTAA CTAAAGTTAC AAATGTGGTT
TAATAGAGAA AGCATAGTAG TTTCAAGAAA TGGTGGTAAA
ACTATTGGAA ATCCTTATGC AAAAACAAAC CAAATTTCCA
CCTACACTGA GCCACATATA AGAATTAATA CAAAATGGAT
TACAGACCTA AGTGTAAAAC TAAAACTCTA AACTGTGTAA
AAAAAAAAAA GAGAGAAAAA TCTGTGATCA TGGATTGCCT
ATAACAAAAG AACAAACTGA AATGGCCTTG TTGCCTGGGG
TGGCACCCGA GGTTCTTGGT CTCACGCTGA GGAAATCAAG
GACGCTGACA CACCAAGGGT GTGAGGCTAG AGCAGAAGTT
TAATAGGCAA AAGAAAGAGA CTAGCTCTCT CCTGCAGAGA
GAGGTCCTGA AAAGAGTTCC CATTCCACAG TGAAATGCAA
GCATTTTTAT AAATGAGCTA ATGGGAAGGG GGTAGCTTAT
CTACACATAG GGAGCAAAAA ACCAGTTAGG ACCAGGTGTT
GCCATCTGCA CAGAGCGTGA ATCTCTGGCA TCCCCCACCC
CAACCTTTTA TTATGCAGGC AGGTCCTTGG CCTGAGCTAC
TCCACATTGC TTATCTCTTT CCTATTGTGC ATGTGCTAAA
TAAGGGGAGG TGGAGCCACC ATGGTGGACA TGCCTGGCCC
CAGGTACCCC TTTCTCTCCG TGCAGCTGCA GGCAACCCCA
ACAACTCACA ACATGCAAGC TTCCAGCTTC CTTATCTGAG
TATGTACTAA GGTCCACTGT GTTTACTTCA CATACTGTGT
TTACTTCACA TACCCACCTT ACGTATGTGA AGCTTGCTGA
TTACCCAGGA AGCTCCCCCT CTGTGCCAGA GCTGCTTCCT
TATACATGTT TACAGCCCGA TCTTCCAGGC TGCTCCTTGT
TAGAAGAGAA GTGATTTCTT GGGCTGCTTT TTGTTAGAAG
GGAAGTTCTA CCGAGGACTC TGTCTAACTA TCGGCTTACC
TAGTCTTTTT TTACCTCCTC TCTCAAAACC ATCAAAGAAA
AAACTGAAAA ATTAGATTTC AGOAAAATTA AGATTTTCTG
TTCTTAAAAA GACGTTGTTA ACAAAATGAA AAACCAAAGT
GTAAACCGGG AGAAAATACA TGCAAGTTAC CTATCTGATA
AAGATATTGT ACCCAGCAAA CATGAAGAAC TCTCAAACCT
CAACAACAAA AAAATTCAAT TAAAAGATGG GTAAGTTGGC
CGGGTGCAGT GGCTCATACT TGCAATCCCA ATCTTTGGGA
GGCTGAGGCA GGAAGATTGC TTGAGCCCAG GAGTTCACGA
CAAGCCCAGG CAACATAATG AGACCTTGTT TCTACAAAAT
TTTAAAAAAT TAGCCAGGCA TTGTGGCGTG TGCTCGTAAT
TTCAGCTACT CAGAAGGCTG AGACAAGAAG ACTGAGCGCA
GGAGGTGGAG GCTGCAGTAG GCTGTGTGAT TGCACCACTG
CACAACAGCC TGGGTGACAG AGIGAGACAC TGTCTCCAAA
AAAAAAAAAA AAA

[0342] According to some aspects, methods of increasing the levels of a soluble variant of a transmembrane receptor in a cell are contemplated herein. In some embodiments, the method comprises contacting a cell with an effective amount of a SNA that modulates splicing of the pre-mRNA of a transmembrane receptor to produce a soluble variant of the transmembrane receptor such that the level of soluble variant of the transmembrane receptor is increased relative to a cell that has not been contacted with the SNA or relative to a cell contacted with the corresponding linear oligonucleotide not in a SNA, wherein the levels of the mRNA encoding the transmembrane receptor are not decreased through RNAse-H mediated degradation.

[0343] In some embodiments, the transmembrane receptor is an ion channel linked receptor, and enzyme-linked receptor, or a G protein-coupled receptor. In some embodiments, the transmembrane receptor is an adrenergic receptor, an olfactory receptor, a receptor tyrosine kinase, an epidermal growth factor receptor, an insulin receptor, a fibroblast growth factor receptor, a neurotrophin receptor, an ephrin receptor, an integrin, a low affinity nerve growth factor receptor, a N-methyl-D-aspartate (NMDA) receptor, or an immune receptor. In some embodiments, the transmembrane receptor is a toll-like receptor, a T-cell receptor, a cluster of differentiation 28 (CD28), or a csk-interacting membrane (SCIMP) protein.

[0344] In some embodiments, the immune receptor is a pattern recognition receptor, a killer activated receptor, a killer inhibitor receptor, a complement receptor, an Fc receptor, a B cell receptor, a T cell receptor, or a cytokine receptor.

[0345] In other embodiments, the second oligonucleotide is siRNA that targets a lncRNA. In some embodiments, the lncRNA is SMN-AS1, GenBank accession #BC045789.1 (d'Ydewalle et al., 2017, Neuron 93, 66-79). In embodiments the second oligonucleotide is chosen from SEQ ID NO: 119 to SEQ ID NO: 198 or oligonucleotides having 85%, 90%, 95%, 96%, 97%, 98%, or 99% sequence identity with oligonucleotides of SEQ ID NO: 119 to SEQ ID NO: 198. In some embodiments, the second oligonucleotide has a 5-10-5 MOE gapmer design, wherein the central gap segment comprises of ten 2′-deoxynucleosides and is flanked by wing segments on the 5′ direction and the 3′ direction comprising five nucleosides each. Each nucleoside in the 5 wing segment and/or each nucleoside in the 3′ wing segment may have a 2′-MOE modification. The internucleoside linkages throughout each gapmer are phosphorothioate (P═S) linkages. In some embodiments, the gapmers have mixed backbone, including phosphorothioate and phosphodiester internucleotide linkages. In some embodiments, one or more or all cytosine residues throughout each gapmer are 5-methylcytosines.

| Seq ID | |
|---|---|
| No | Sequence (5′ → 3′) |
| 119 | G*T*A*C*T*A*C*A*C*T*T*T*T*A*A*T*T*A*C*T- (Spacer 18)2 - 3CholTEG |
| 120 | T*G*T*A*T*A*T*T*G*A*T*G*T*C*A*G*T*A*C*T- (Spacer 18)2 - 3CholTEG |
| 121 | T*A*C*A*T*T*G*T*C*T*A*T*T*A*G*T*G*T*A*T- (Spacer 18)2 - 3CholTEG |
| 122 | T*G*A*C*T*C*T*C*A*A*T*T*C*T*G*T*T*A*C*A- (Spacer 18)2 - 3CholTEG |
| 123 | T*C*A*C*A*G*G*G*C*T*A*T*T*T*C*T*G*A*C*T- (Spacer 18)2 - 3CholTEG |
| 124 | A*A*T*C*A*G*T*C*A*C*A*T*A*T*A*T*C*A*C*A- (Spacer 18)2 - 3CholTEG |
| 125 | T*G*T*A*A*C*T*T*T*A*G*T*T*A*A*A*A*T*C*A- (Spacer 18)2 - 3CholTEG |
| 126 | C*T*A*T*T*A*A*A*C*C*A*C*A*T*T*T*G*T*A*A- (Spacer 18)2 - 3CholTEG |
| 127 | A*C*T*A*C*T*A*T*G*C*T*T*T*C*T*C*T*A*T*T- (Spacer 18)2 - 3CholTEG |
| 128 | C*C*A*C*C*A*T*T*T*C*T*T*G*A*A*A*C*T*A*G- (Spacer 18)2 - 3CholTEG |
| 129 | T*T*T*C*C*A*A*T*A*G*T*T*T*T*A*C*C*A*C*C- (Spacer 18)2 - 3CholTEG |
| 130 | G*T*T*T*T*T*G*C*A*T*A*A*G*G*A*T*T*T*C*C- (Spacer 18)2 - 3CholTEG |
| 131 | G*T*G*G*A*A*A*T*T*T*G*G*T*T*T*G*T*T*T*T- (Spacer 18)2 - 3CholTEG |
| 132 | T*G*T*G*G*C*T*C*A*G*T*G*T*A*G*G*T*G*G*A- (Spacer 18)2 - 3CholTEG |
| 133 | G*T*A*T*T*A*A*T*T*C*T*T*A*T*A*T*G*T*G*G- (Spacer 18)2 - 3CholTEG |
| 134 | T*T*A*G*T*T*T*T*A*C*A*C*T*T*A*G*G*T*C*T- (Spacer 18)2 - 3CholTEG |
| 135 | A*C*A*C*A*G*T*T*T*A*G*A*G*T*T*T*T*A*G*T- (Spacer 18)2 - 3CholTEG |
| 136 | G*A*T*C*A*C*A*G*A*T*T*T*T*T*C*T*C*T*C*T- (Spacer 18)2 - 3CholTEG |
| 137 | T*T*A*T*A*G*G*C*A*A*T*C*C*A*T*G*A*T*C*A- (Spacer 18)2 - 3CholTEG |
| 138 | C*A*T*T*T*G*A*G*T*T*T*G*T*T*C*T*T*T*T*G- (Spacer 18)2 - 3CholTEG |
| 139 | C*C*C*A*G*G*C*A*A*C*A*A*G*G*C*C*A*T*T*T- (Spacer 18)2 - 3CholTEG |
| 140 | G*A*A*C*C*T*C*G*G*G*T*G*C*C*A*C*C*C*C*A- (Spacer 18)2 - 3CholTEG |
| 141 | C*G*T*C*C*T*T*G*A*T*T*T*G*C*T*C*A*G*C*G- (Spacer 18)2 - 3CholTEG |
| 142 | A*C*A*C*C*C*T*T*G*G*T*G*T*G*T*C*A*G*C*G- (Spacer 18)2 - 3CholTEG |
| 143 | T*T*C*T*G*C*T*C*T*A*G*C*C*T*C*A*C*A*C*C- (Spacer 18)2 - 3CholTEG |
| 144 | G*G*A*G*A*G*A*G*C*T*A*G*T*C*T*C*T*T*T*C- (Spacer 18)2 - 3CholTEG |
| 145 | A*G*G*A*C*C*T*C*T*C*T*C*T*G*C*A*G*G*A*G- (Spacer 18)2 - 3CholTEG |
| 146 | A*T*G*G*G*A*A*C*T*C*T*T*T*T*C*A*G*G*A*C- (Spacer 18)2 - 3CholTEG |
| 147 | G*C*A*T*T*T*C*A*C*T*G*T*G*G*A*A*T*G*G*G- (Spacer 18)2 - 3CholTEG |
| 148 | T*T*T*A*T*A*A*A*A*A*T*G*C*T*T*G*C*A*T*T- (Spacer 18)2 - 3CholTEG |
| 149 | C*T*T*C*C*C*A*T*T*A*G*C*T*G*A*T*T*T*A*T- (Spacer 18)2 - 3CholTEG |
| 150 | T*A*G*A*T*A*A*G*C*T*A*C*C*C*C*C*T*T*C*C- (Spacer 18)2 - 3CholTEG |
| 151 | T*T*T*G*G*T*C*C*C*T*A*T*G*T*G*T*A*G*A*T- (Spacer 18)2 - 3CholTEG |
| 152 | G*G*T*C*C*T*A*A*C*T*G*G*T*T*T*T*T*T*G*C- (Spacer 18)2 - 3CholTEG |
| 153 | C*A*G*A*T*G*G*C*A*A*C*A*C*C*T*G*G*T*C*C- (Spacer 18)2 - 3CholTEG |
| 154 | G*A*T*T*G*A*c*G*C*T*C*T*G*T*G*C*A*G*A*T- (Spacer 18)2 - 3CholTEG |
| 155 | G*C*C*T*G*C*A*T*A*A*T*A*A*A*A*G*G*T*T*G- (Spacer 18)2 - 3CholTEG |
| 156 | T*C*A*G*G*C*C*A*A*G*G*A*C*C*T*G*C*C*T*G- (Spacer 18)2 - 3CholTEG |
| 157 | T*A*A*G*C*A*A*T*G*T*G*G*A*G*T*A*G*C*T*C- (Spacer 18)2 - 3CholTEG |
| 158 | A*C*A*A*T*A*G*G*A*A*A*G*A*G*A*T*A*A*G*C- (Spacer 18)2 - 3CholTEG |
| 159 | T*T*A*T*T*T*A*G*C*A*C*A*T*G*C*A*C*A*A*T- (Spacer 18)2 - 3CholTEG |
| 160 | T*G*G*CAT*C*C*A*C*C*T*C*C*C*C*T*T*A*T*T- (Spacer 18)2 - 3CholTEG |
| 161 | G*C*A*T*G*T*C*C*A*C*C*A*T*G*G*T*G*G*C*T- (Spacer 18)2 - 3CholTEG |
| 162 | A*G*C*T*G*C*A*C*G*G*A*G*A*G*A*A*A*G*G*G- (Spacer 18)2 - 3CholTEG |
| 163 | G*C*A*T*G*T*T*G*T*G*A*G*T*T*G*T*T*G*G*G- (Spacer 18)2 - 3CholTEG |
| 164 | T*C*A*G*A*T*A*A*G*G*A*A*G*C*T*G*G*A*A*G- (Spacer 18)2 - 3CholTEG |
| 165 | G*A*C*C*T*T*A*G*T*A*C*A*T*A*C*T*C*A*G*A- (Spacer 18)2 - 3CholTEG |
| 166 | G*A*A*G*T*A*A*A*C*A*C*A*G*T*G*G*A*C*G*T- (Spacer 18)2 - 3CholTEG |
| 167 | G*T*A*T*G*T*G*A*A*G*T*A*A*A*C*A*C*A*G*T- (Spacer 18)2 - 3CholTEG |
| 168 | G*T*A*A*A*C*A*C*A*G*T*A*T*G*T*G*A*A*G*T- (Spacer 18)2 - 3CholTEG |
| 169 | A*G*G*T*G*G*G*T*A*T*G*T*G*A*A*G*T*A*A*A- (Spacer 18)2 - 3CholTEG |
| 170 | A*T*C*A*G*C*A*A*G*C*T*T*C*A*C*A*T*A*C*G- (Spacer 18)2 - 3CholTEG |
| 171 | G*G*A*G*C*T*T*C*C*T*G*G*G*T*A*A*T*C*A*G- (Spacer 18)2 - 3CholTEG |
| 172 | A*G*C*A*G*C*T*C*T*G*G*C*A*C*A*G*A*G*G*G- (Spacer 18)2 - 3CholTEG |
| 173 | A*A*A*C*A*T*G*T*A*T*A*A*G*G*A*A*G*C*A*G- (Spacer 18)2 - 3CholTEG |
| 174 | G*G*A*A*G*A*T*C*G*G*G*C*T*G*T*A*A*A*C*A- (Spacer 18)2 - 3CholTEG |
| 175 | A*C*T*T*G*T*C*T*T*C*T*A*A*C*A*A*G*G*A*G- (Spacer 18)2 - 3CholTEG |
| 176 | C*A*G*A*G*T*C*C*T*C*G*G*T*A*G*A*A*C*T*T- (Spacer 18)2 - 3CholTEG |
| 177 | A*A*G*C*C*G*A*T*A*G*T*T*A*G*A*C*A*G*A*G- (Spacer 18)2 - 3CholTEG |
| 178 | A*A*A*A*A*A*A*G*A*C*T*A*G*G*T*A*A*G*C*C- (Spacer 18)2 - 3CholTEG |
| 179 | G*T*T*T*T*G*A*G*A*G*A*G*G*A*G*G*T*A*A*A- (Spacer 18)2 - 3CholTEG |
| 180 | G*T*T*T*T*T*T*C*T*T*T*G*A*T*G*G*T*T*T*T- (Spacer 18)2 - 3CholTEG |
| 181 | G*A*A*A*T*C*T*A*A*T*T*T*T*T*C*A*G*T*T*T- (Spacer 18)2 - 3CholTEG |
| 182 | A*A*T*C*T*T*A*A*T*T*T*T*G*C*T*G*A*A*A*T- (Spacer 18)2 - 3CholTEG |
| 183 | T*T*T*T*J*A*A*G*A*A*C*A*G*A*A*A*A*T*C*T- (Spacer 18)2 - 3CholTEG |
| 184 | A*C*A*C*T*T*T*G*G*T*T*T*T*T*C*A*T*T*T*T- (Spacer 18)2 - 3CholTEG |
| 185 | A*T*T*T*T*C*T*C*C*C*G*G*T*T*T*A*C*A*C*T- (Spacer 18)2 - 3CholTEG |
| 186 | A*G*G*T*A*A*C*T*T*G*C*A*T*G*T*A*T*T*T*T- (Spacer 18)2 - 3CholTEG |
| 187 | A*A*T*A*T*C*T*T*T*A*T*C*A*G*A*T*A*G*G*T- (Spacer 18)2 - 3CholTEG |
| 188 | A*T*G*T*T*T*G*C*T*G*G*G*T*A*C*A*A*T*A*T- (Spacer 18)2 - 3CholTEG |
| 189 | G*T*T*T*G*A*C*A*G*T*T*C*T*T*C*A*T*G*T*T- (Spacer 18)2 - 3CholTEG |
| 190 | C*A*T*C*T*T*T*T*A*A*T*T*G*A*A*T*T*T*T*T- (Spacer 18)2 - 3CholTEG |
| 191 | C*C*C*G*G*C*C*A*A*C*T*T*A*C*C*C*A*T*C*T- (Spacer 18)2 - 3CholTEG |
| 192 | G*A*T*T*G*G*G*A*T*T*G*C*A*A*G*T*A*T*G*A- (Spacer 18)2 - 3CholTEG |
| 193 | G*A*G*C*A*C*A*C*G*C*C*A*C*A*A*T*G*C*C*T- (Spacer 18)2 - 3CholTEG |
| 194 | A*G*T*C*T*T*C*T*T*G*T*C*T*C*A*G*C*C*T*T- (Spacer 18)2 - 3CholTEG |
| 195 | C*C*A*C*C*T*C*C*T*G*C*G*C*T*C*A*G*T*C*T- (Spacer 18)2 - 3CholTEG |
| 196 | T*C*A*C*A*C*A*G*C*C*T*A*C*T*G*C*A*G*C*C- (Spacer 18)2 - 3CholTEG |
| 197 | C*A#G#A#G#T*C*C*T*C*G*G*T*A*G*A#A#C*T*T- (Spacer 18)2 - 3CholTEG |
| 198 | G*A#A#A#T#C*T*A*A*T*T*T*T*T*C*A#G#T*T*T- (Spacer 18)2 - 3CholTEG |

* = phosphorothioate internucleotide linkage;
# = phosphodiester internucleotide linkage;
Spacer 18 = internal hexaethyleneglycol spacer;
3CholTEG = 3′-Cholesteryl-TEG;
TEG = tetraethylene glycol

[0346] In some embodiments, the first oligonucleotide and the second oligonucleotides are in the same SNA. In some embodiments, the first oligonucleotide and the second oligonucleotide are in different SNAs, where such SNAs can be administered as a mixture in the same composition, wherein the composition optionally comprises a pharmaceutically acceptable carrier, or one SNA after the other. In some embodiments, the SNA contains more than two distinct oligonucleotides. In some embodiments, the SNA contains oligonucleotides that target more than two distinct targets.

[0347] In some embodiments, a SNA described herein comprises or consists of an oligonucleotide (e.g., antisense oligonucleotide) that is 50% to 100% identical to the nucleic acid sequence of CCCACAGGGGCATGUAGU (SEQ ID NO: 58). In some embodiments, a SNA described herein comprises an oligonucleotide that is 50% identical, 55% identical, 60% identical, 65% identical, 70% identical, 75% identical, 80% identical, 85% identical, 86% identical, 87% identical, 88% identical, 89% identical, 90% identical, 91% identical, 92% identical, 93% identical, 94% identical, 95% identical, 96% identical, 97% identical, 98% identical, 99% identical, 99.5% identical, or 100% identical to the nucleic acid sequence of SEQ ID NO: 58.

[0348] In some embodiments, a SNA described herein comprises or consists of an oligonucleotide (e.g., antisense oligonucleotide) that is 50% to 100% identical to the nucleic acid sequence of mCmCmCmAmCmAmGmG*mG*mG*mC*mA*mT*mGmUmAmGmU (SEQ iD NO: 59), wherein * is a phosphorothioate linkage and m is a 2′-O-methylated nucleotide. In some embodiments, a SNA described herein comprises an oligonucleotide that is 50% identical, 55% identical, 60% identical, 65% identical, 70% identical, 75% identical, 80% identical, 85% identical, 86% identical, 87% identical, 88% identical, 89% identical, 90% identical, 91% identical, 92% identical, 93% identical, 94% identical, 95% identical, 96% identical, 97% identical, 98% identical, 99% identical, 99.5% identical, or 100% identical to the nucleic acid sequence of SEQ ID NO: 59.

[0349] In some embodiments, a SNA described herein comprises or consists of an oligonucleotide (e.g., antisense oligonucleotide) that is 50% to 100% identical to the nucleic acid sequence of mCmCmCmAmCmAmGmG*mG*mG*mC*mA*mT*mGmUmAmGmU/Spacer18/Spacer18/3 CholTEG (SEQ ID NO: 211), wherein * is a phosphorothioate linkage, m is a 2′-O-methylated nucleotide, Spacer18 is a hexa(ethylene glycol) spacer, and 3CholTEG is tri(ethylene glycol) bound to a cholesterol. In some embodiments, a SNA described herein comprises an oligonucleotide that is 50% identical, 55% identical, 60% identical, 65% identical, 70% identical, 75% identical, 80% identical, 85% identical, 86% identical, 87% identical, 88% identical, 89% identical, 90% identical, 91% identical, 92% identical, 93% identical, 94% identical, 95% identical, 96% identical, 97% identical, 98% identical, 99% identical, 99.5% identical, or 100% identical to the nucleic acid sequence of SEQ ID NO: 211.

| Name | SEQ ID NO | Sequence | Target | Lipidated? |
|---|---|---|---|---|
| hIL17RA1 | 199 | mCmCmCmAmCmAmGG*G*G*C*A* | HJ7RA | Yes |
| 077 (7/6/5) | | T*mGmUmAmGmU/isp18//isp1 | | |
| (5′ to 3′) | | 8//3CholTEG/ | | |
| hIL17RA_ | 200 | mCmCmCmAmCmAmGG*G*G*C*A* | IL17RA | No |
| 1077 | | T*mGmUmAmGmU | | |
| (7/6/5) | | | | |
| Linear (3′- | | | | |
| DMT) | | | | |
| hIL1RAPv6 | 201 | moeA*moeT*MoeG*moeG*moeT | IL1RAP | Yes |
| _1377- | | *moeA*moeA*moeA*/5-Me- | | |
| moePS | | moeC/*moeA*moeA*/5-Me- | | |
| | | moeC/*moeA*moeA*moeT*moe | | |
| | | G*moeA*moeG/isp18//isp18 | | |
| | | //3CholTEG/ | | |
| hILIRAPv | 202 | moeA*moeT*moeG*moeG*moeT | IL1RAP | No |
| -1377- | | *moeA*moeA*moeA*/5-Me- | | |
| moePS | | moeC/*moeA*moeA*/5-Me- | | |
| | | moeC/*moeA*moeA*moeT*moe | | |
| | | G*moeA*moeG | | |
| IL 1 RAP | 203 | moeU*moeU*moeU*moeC*moeA | IL1RAP | Yes |
| PS-373 | | moeUmoeC*moeU*moeG*moe | | |
| MOE Choi | | U*moeU*moeC*moeC*moeA*mo | | |
| | | eA*moeA*moeA*moeU*moeG*m | | |
| | | oeA*moeG/isp18//isp18//3 | | |
| | | CholTEG/ | | |
| IL1RAP | 204 | moeU*moeU*moeU*moeC*moeA | IL1RAP | No |
| PS-373moe | | moeUmoeC*moeU*moeG*moe | | |
| linear | | U*moeU*moeC*moeC*moeA*mo | | |
| | | eA*moeA*moeA*moeU*moeG*m | | |
| | | oeA*moeG | | |
| E3I3 all PS | 205 | moeG*/5-Me- | REST | Yes |
| (3′-DMT) | | moeC/*moeA*moeG*moeT*/5- | | |
| | | Me-moeC/*moeA*/5Me | | |
| | | moeC/*/5-Me- | | |
| | | moeC/*moeA*moeT*/5-Me- | | |
| | | moeC/*moeT*moeT*moeA*/5- | | |
| | | Me-moe/*/5-Me- | | |
| | | moeC/*moeA*moeA*/5-Me- | | |
| | | moeC/*/5-Me- | | |
| | | moeC/moeT*moeG*moeA*moe | | |
| | | A/iSp18//iSp18// | | |
| | | 3CholTEG/ | | |
| E3I3 MOE | 206 | moeG*/5-Me- | REST | No |
| all PS | | moeC/*moeA*moeG*moeT*/5- | | |
| linear | | Me-moeC/*moeA*/5-Me- | | |
| | | moeC/*/5-Me- | | |
| | | moeC/*moeA*moeT*/5-Me- | | |
| | | moeC/*moeT*moeT*moeA*/5- | | |
| | | Me-moeC/*/5-Me- | | |
| | | moeC/*moeA*moeA*/5-Me- | | |
| | | moeC/*/5-Me- | | |
| | | moeC/*moeT*moeG*moeA*moe | | |
| | | A | | |
| STAT3 ST7 | 207 | moeT*moeT*/5-Me- | STAT3 | Yes |
| Chol | | moeC/*moeA*/5Me | | |
| (3′-DMT) | | moeC/*moeT*moeT*moeG*/5- | | |
| | | Me-moeC/*/5-Me- | | |
| | | moeC/*moeT*/5-Me- | | |
| | | moeC/*/5-Me- | | |
| | | moeC/*moeT*moeT*moeG*moe | | |
| | | A*/5Me-moeC/*moeT*/5 | | |
| | | Me-moeC/*moeT*moeT* | | |
| | | moeG/isp18//isp18// | | |
| | | 3CholTEG/ | | |
| STAT3 ST7 | 208 | moeT*moeT*/5Me | STAT3 | No |
| linear | | moeC/*moeA*/5-Me- | | |
| | | moeC/*moeT*moeT*moeG*/5- | | |
| | | Me-moeC/*/5-Me- | | |
| | | moeC/*moeT*/5-Me- | | |
| | | moeC/*/5-Me- | | |
| | | moeC/*moeT*moeT*moeG*moe | | |
| | | A*/5-Me-moeC/*moeT*/5- | | |
| | | Me-moeC/*moeT*moeT*moeG | | |
| AntiControl | 209 | mGmUmUmUmCmAC*C*A*C*C*C* | Control | Yes |
| (5′-3′) | | mAmAmUmUmCmC/iSp18//iSp1 | | |
| | | 8//3CholTEG/ | | |
| SMN | 210 | moeT*moeG*moeT*moeA*moeT | Control | Yes |
| Control-1 | | */5-Me-moeC/*moeT*/5-Me- | | |
| Linear | | moeC/*moeA*moeT*moeT*moe | | |
| | | G*moeT*moeA*moeG | | |

[0350] NCBI Transcripts

| Gene Name | Accession Number |
|---|---|
| IL17RA | NC_000022.11 Reference GRCh38.p13 Primary Assembly |
| IL1RAP | NC_000003.12 Reference GRCh38.p13 Primary Assembly |
| REST | NC_000004.12 Reference GRCh38.p13 Primary Assembly |
| STAT3 | NC_000017.11 Reference GRCh38.p13 Primary Assembly |

[0351] In some embodiments, a SNA described herein comprises or consists of an oligonucleotide (e.g., antisense oligonucleotide) that targets REST and that is 50% to 100% identical to the nucleic acid sequence of GCAGTCACCATCTITACCAACCTGAA (SEQ ID NO: 213), SEQ ID NO: 205, or SEQ ID NO: 206. In some embodiments, a SNA described herein comprises an oligonucleotide that is 50% identical, 55% identical, 60% identical, 65% identical, 70% identical, 75% identical, 80% identical, 85% identical, 86% identical, 87% identical, 88% identical, 89% identical, 90% identical, 91% identical, 92% identical, 93% identical, 94% identical, 95% identical, 96% identical, 97% identical, 98% identical, 99% identical, 99.5% identical, or 100% identical to the nucleic acid sequence of SEQ ID NO: 212, SEQ ID NO: 213, SEQ ID NO: 205 or SEQ ID NO: 206. (See e.g., Chen et al., J Cell Mol Med (2017) 21(11):2974-2984, which is incorporated herein by reference in its entirety).

[0352] In some embodiments, a SNA described herein comprises or consists of an oligonucleotide (e.g., antisense oligonucleotide) that targets STAT3 and is 50% to 100% identical to the nucleic acid sequence of TTICACTITGCCTCCTITGACTCTITG (SEQ ID NO: 214), SEQ ID NO: 207 or SEQ ID NO: 208. In some embodiments, a SNA described herein comprises an oligonucleotide that is 50% identical, 55% identical, 60% identical, 65% identical, 70% identical, 75% identical, 80% identical, 85% identical, 86% identical, 87% identical, 88% identical, 89% identical, 90% identical, 91% identical, 92% identical, 93% identical, 94% identical, 95% identical, 96% identical, 97% identical, 98% identical, 99% identical, 99.5% identical, or 100% identical to the nucleic acid sequence of SEQ ID NO: 214, SEQ ID NO: 207 or SEQ ID NO: 208. (See e.g., Zammarchi et al., PNAS (2011) 108(43): 17779-84, which is incorporated herein by reference in its entirety).

[0353] In some embodiments, a SNA described herein comprises or consists of an oligonucleotide (e.g., antisense oligonucleotide) that targets IL1RAP and that is 50% to 100% identical to the nucleic acid sequence of CTCATTGTTGTTTACCAT (SEQ ID NO: 9), the nucleic acid sequence of ATGGTAAACAACAATGAG (SEQ ID NO: 11), the nucleic acid sequence of UUUCAUCUGUUCCAAAAUGAG (SEQ ID NO: 212), SEQ ID NO: 201, SEQ ID NO: 202, SEQ ID NO: 203, or SEQ ID NO: 204. In some embodiments, a SNA described herein comprises an oligonucleotide that is 50% identical, 55% identical, 60% identical, 65% identical, 70% identical, 75% identical, 80% identical, 85% identical, 86% identical, 87% identical, 88% identical, 89% identical, 90% identical, 91% identical, 92% identical, 93% identical, 94% identical, 95% identical, 96% identical, 97% identical, 98% identical, 99% identical, 99.5% identical, or 100% identical to the nucleic acid sequence of SEQ ID NO: 9, SEQ ID NO: 11, SEQ ID NO: 212, SEQ ID NO: 201, SEQ ID NO: 202, SEQ ID NO: 203, or SEQ ID NO: 204. In some embodiments, a SNA described herein comprises or consists of an oligonucleotide (e.g., antisense oligonucleotide) that is 50% to 100% identical to the nucleic acid sequence of TGTATCTCATTGTAG (SEQ ID NO: 215). In some embodiments, a SNA described herein comprises an oligonucleotide that is 50% identical, 55% identical, 60% identical, 65% identical, 70% identical, 75% identical, 80% identical, 85% identical, 86% identical, 87% identical, 88% identical, 89% identical, 90% identical, 91% identical, 92% identical, 93% identical, 94% identical, 95% identical, 96% identical, 97% identical, 98% identical, 99% identical, 99.5% identical, or 100% identical to the nucleic acid sequence of SEQ ID NO: 215. In some embodiments, the nucleic acid sequence of SEQ ID NO: 215 is used as a control.

[0354] In some embodiments, a modification to one or more of the nucleotides of an oligonucleotide or antisense oligonucleotide described herein decreases or prevents RNAse-H-catalyzed mRNA degradation. In some embodiments, the modification is a 2′-methoxyethyl (2′-MOE) modification. In some embodiments, the modification is a 2′-O-methyl modification. In some embodiments, other modifications, such as modifications known to one of ordinary skill in the art, decrease or prevent RNAse-H catalyzed mRNA degradation. Without wishing to be bound by theory, oligonucleotides or antisense oligonucleotides, such as the oligonucleotides or antisense oligonucleotides described herein, that are less prone or completely protected from RNAse-H-catalyzed mRNA degradation are useful in therapy that modifies mRNA splicing. In some embodiments, the modification is used in combination with traditional antisense/siRNA therapy. As described herein, traditional antisense/siRNA therapy relates to RNAse-H dependent cleavage of mRNA; traditional antisense/siRNA therapy is the RISC-catalyzed mRNA degradation. In exon modulation or splice modulation, the aim is not to degrade the target mRNA. In some embodiments, only the splicing patterns are altered.

[0355] In some embodiments, the present disclosure provides administration of a first SNA into the cerebrospinal fluid (CSF), in combination with systemic delivery of a second SNA. Systemic administration and CSF administration can occur simultaneously, separately or sequentially. In some embodiments, a subject receives a first dose of a SNA in the CSF and subsequently receives a second dose of a SNA through a different route of administration. In some embodiments, a subject receives a first dose of a SNA in the CSF and subsequently receives a second dose of an antisense compound systemically. In some embodiments, the SNA administered into the CSF comprises the oligonucleotide of SEQ ID NO:1 or SEQ ID NO: 16.

[0356] In some embodiments, a target precursor transcript is associated with a disease or condition. In certain such embodiments, an oligomeric compound comprising or consisting of a modified oligonucleotide that is complementary to the target precursor transcript is used to treat the disease or condition. In certain such embodiments, the compound modulates processing of the target precursor transcript to produce a beneficial target processed transcript. In certain such embodiments, the disease or condition is associated with aberrant processing of a precursor transcript. In certain such embodiments, the disease, disorder or condition is related to or associated with an abnormality in splice modulation of a pre-mRNA.

[0357] According to some aspects, methods for treating a subject having a disease or disorder related to an abnormality in splice modulation are contemplated herein. In some embodiments, the method comprises administering to a subject having the disease or disorder related to an abnormality in splice modulation a SNA in an effective amount to decrease expression levels of a protein of interest under a baseline level in the subject in order to treat the disease or disorder related to an abnormality in splice modulation.

[0358] In some embodiments, the SNA is a SNA disclosed herein.

[0359] In some embodiments, a SNA described herein is used for the treatment of a disease, disorder or condition is related to or associated with an abnormality in splice modulation of a pre-mRNA. A non-limiting example includes spinal muscular atrophy (SMA).

[0360] In some embodiments, SMA is caused by a reduction of the SMN protein. In another embodiment, SMA is caused by a mutation in the SMN1 gene. In one embodiment, the type of SMA can be SMA1, SMA2, SMA3, SMA4, SMARD, SBMA, or DSMA.

[0361] In some embodiments, a SNA described herein is used for the treatment of a genetic disorder. Non-limiting examples include achondroplasia, alpha-1 antitrypsin deficiency, antiphospholipid syndrome, autism, autosomal dominant polycystic kidney disease, breast cancer, charcot-marie-tooth, colon cancer, cri du chat, crohn's disease, cystic fibrosis, dercum disease, down syndrome, duane syndrome, duchenne muscular dystrophy, factor v leiden, thrombophilia, familial hypercholesterolemia, familial mediterranean fever, fragile x syndrome, gaucher disease, hemochromatosis, hemophilia, holoprosencephaly, huntington's disease, klinefelter syndrome, marfan syndrome, myotonic dystrophy, neurofibromatosis, noonan syndrome, osteogenesis imperfecta, parkinson's disease, phenylketonuria, poland anomaly, porphyria, progeria, prostate cancer, retinitis pigmentosa, severe combined immunodeficiency (scid), sickle cell disease, skin cancer, SMA, tay-sachs, thalassemia, trimethylaminuria, turner syndrome, velocardiofacial syndrome, wagr syndrome, and wilson disease.

[0362] In some embodiments, the disease or disorder is not achondroplasia, alpha-1 antitrypsin deficiency, antiphospholipid syndrome, autism, autosomal dominant polycystic kidney disease, breast cancer, charcot-marie-tooth, colon cancer, cri du chat, crohn's disease, cystic fibrosis, dercum disease, down syndrome, duane syndrome, duchenne muscular dystrophy, factor v leiden, thrombophilia, familial hypercholesterolemia, familial mediterranean fever, fragile x syndrome, gaucher disease, hemochromatosis, hemophilia, holoprosencephaly, huntington's disease, klinefelter syndrome, marfan syndrome, myotonic dystrophy, neurofibromatosis, noonan syndrome, osteogenesis imperfecta, parkinson's disease, phenylketonuria, poland anomaly, porphyria, progeria, prostate cancer, retinitis pigmentosa, severe combined immunodeficiency (scid), sickle cell disease, skin cancer, SMA, tay-sachs, thalassemia, trimethylaminuria, turner syndrome, velocardiofacial syndrome, wagr syndrome, or wilson disease.

[0363] Aspects of the invention relate to delivery of SNAs to a subject for therapeutic and/or diagnostic use. The SNAs may be administered alone or in any appropriate pharmaceutical carrier, such as a liquid, for example saline, or a powder, for administration in vivo. The SNAs can also be co-delivered with larger carrier particles or within administration devices. The SNAs may be formulated. The formulations of the invention can be administered in pharmaceutically acceptable solutions, which may routinely contain pharmaceutically acceptable concentrations of salt, buffering agents, preservatives, compatible carriers, adjuvants, and optionally other therapeutic ingredients. It should be appreciated that any method of delivery of SNAs known in the art may be compatible with aspects of the invention.

[0364] As used herein, a “patient,” “individual,” “subject” or “host” refers to either a human, a nonhuman animal or a mammal. In some embodiments, the mammal is a vertebrate animal including but not limited to a dog, cat, horse, cow, pig, sheep, goat, turkey, chicken, primate, e.g., monkey, and fish (aquaculture species), e.g. salmon. Thus, the invention can also be used to treat diseases or disorders in non-human subjects.

[0365] In some embodiments, a SNA described herein is administered in one dose to treat a subject having the disease or disorder related to with an abnormality in splice modulation in an effective amount to increase expression levels of a protein of interest over a baseline level in the subject in order to treat the disease or disorder related to an abnormality in splice modulation. As used herein, a baseline level is the level of a protein of interest in the subject prior to treatment with a SNA described herein. In some embodiments, a subject having a disease or disorder related to an abnormality in splice modulation is administered at least two doses of a SNA, in an effective amount to increase expression levels of a protein of interest over a baseline level in the subject in order to treat a disease or disorder related to an abnormality in splice modulation. In some embodiments, the second dose is administered about 3 months, 6 months, 9 months, one year, 15 months, 18 months, 21 months or two years after the first dose. In some embodiments, the level of a corrected mRNA relative to a defective mRNA associated with a disease or disorder related to an abnormality in splice modulation in the subject is enhanced.

[0366] In some embodiments, a SNA described herein is administered at a dose between 0.1 mg and 10 mg, between 0.2 mg and 10 mg, between 0.3 mg and 10 mg, between 0.4 mg and 10 mg, between 0.5 mg and 10 mg, between 0.6 mg and 10 mg, between 0.7 mg and 10 mg, between 0.8 mg and 10 mg, between 0.9 mg and 10 mg, between 1 mg and 10 mg, between 1 mg and 1000 mg, between 1 mg and 900 mg, between 1 mg and 800 mg, between 1 mg and 700 mg, between 1 mg and 600 mg, between 1 mg and 500 mg, between 1 mg and 450 mg, between 1 mg and 400 mg, between 1 mg and 350 mg, between 1 mg and 300 mg, between 1 mg and 250 mg, between 1 mg and 200 mg, between 1 mg and 150 mg, between 1 mg and 100 mg, between 1 mg and 90 mg, between 1 mg and 80 mg, between 1 mg and 70 mg, between 1 mg and 60 mg, between 1 mg and 60 mg, between 1 mg and 50 mg, between 1 mg and 49 mg, between 1 mg and 48 mg, between 1 mg and 47 mg, between 1 mg and 46 mg, between 1 mg and 45 mg, between 1 mg and 44 mg, between 1 mg and 43 mg, between 1 mg and 42 mg, between 1 mg and 41 mg, between 1 mg and 40 mg, between 1 mg and 39 mg, between 1 mg and 38 mg, between 1 mg and 37 mg, between 1 mg and 36 mg, between 1 mg and 35 mg, between 1 mg and 34 mg, between 1 mg and 33 mg, between 1 mg and 32 mg, between 1 mg and 31 mg, between 1 mg and 30 mg, between 1 mg and 29 mg, between 1 mg in 28 mg, between 1 mg and 27 mg, between 1 mg and 26 mg, between 1 mg and 25 mg, between 1 mg and 24 mg, between 1 mg and 23 mg, between 1 mg and 22 mg, between 1 mg and 21 mg, between 1 mg and 20 mg, between 1 mg and 19 mg, between 1 mg and 18 mg, between 1 mg and 17 mg, between 1 mg and 16 mg, between 1 mg and 15 mg, between 1 mg and 14 mg, between 1 mg and 13 mg, between 1 mg and 12 mg, between 1 mg and 11 mg, between 1 mg and 10 mg, between 1 mg and 9 mg, between 1 mg and 8 mg, between 1 mg and 7 mg, between 1 mg and 6 mg, between 1 mg and 5 mg, between 1 mg and 4 mg, between 1 mg and 2 mg, between 1 mg and 1.5 mg, between 1 mg and 3 mg, between 3 mg and 5 mg, between 5 mg and 7 mg, between 7 mg and 9 mg, between 9 mg and 14 mg, between 15 mg and 17 mg, between 18 mg and 31 mg, between 31 mg and 33 mg, between 0.5 mg and 2 mg, between 2 mg and 4 mg, between 11 mg and 13 mg, between 23 mg and 25 mg, between 2 mg and 31 mg, between 2 mg and 30 mg, between 2 mg and 29 mg, between 2 mg and 28 mg, between 2 mg and 27 mg, between 2 mg and 26 mg, between 2 mg and 25 mg, between 2 mg and 24 mg, between 2 mg and 23 mg, between 2 mg and 22 mg, between 2 mg and 21 mg, between 2 mg and 20 mg, between 2 mg and 19 mg, between 2 mg and 18 mg, between 2 mg and 17 mg, between 2 mg and 16 mg, between 2 mg and 15 mg, between 2 mg and 14 mg, between 2 mg and 13 mg, between 2 mg and 12 mg, between 2 mg and 11 mg, between 2 mg and 10 mg, between 2 mg and 9 mg, between 2 mg and 8 mg, between 2 mg and 7 mg, between 2 mg and 6 mg, between 2 mg and 5 mg, between 2 mg and 3 mg.

[0367] In some embodiments, a SNA disclosed herein administered at a dose of or about 0.1 mg, 0.2 mg, 0.3 mg, 0.4 mg, 0.5 mg, 0.6 mg, 0.7 mg, 0.8 mg, 0.9 mg, 1 mg, 1.1 mg, 1.2 mg, 1.3 mg, 1.4 mg, 1.5 mg, 1.6 mg, 1.7 mg, 1.8 mg, 1.9 mg, 2 mg, 2.1 mg, 2.2 mg, 2.3 mg, 2.4 mg, 2.5 mg, 2.6 mg, 2.7 mg, 2.8 mg, 2.9 mg, 3 mg, 3.1 mg, 3.2 mg, 3.3 mg, 3.4 mg, 3.5 mg, 3.6 mg, 3.7 mg, 3.8 mg, 3.9 mg, 4 mg, 4.5 mg, 5 mg, 5.5 mg, 6 mg, 6.5 mg, 7 mg, 7.5 mg, 8 mg, 8.5 mg, 9 mg, 9.5 mg, 10 mg, 10.5 mg, 11 mg, 11.5 mg, 12 mg, 12.5 mg, 30 mg, 13.5 mg, 40 mg, 14.5 mg, 50 mg, 15.5 mg, 60 mg, 16.5 mg, 70 mg, 70.5 mg, 18 mg, 18.5 mg, 19 mg, 19.5 mg, 20 mg, 20.5 mg, 21 mg, 21.5 mg, 22 mg, 22.5 mg, 23 mg, 23.5 mg, 24 mg, 24.5 mg, 25 mg, 25.5 mg, 26 mg, 26.5 mg, 27 mg, 27.5 mg, 28 mg, 28.5 mg, 29 mg, 29.5 mg, 30 mg, 30.5 mg, 31 mg, 31.5 mg, 32 mg, 32.5 mg, 33 mg, 33.5 mg, 34 mg, 34.5 mg, 35 mg, 35.5 mg, 36 mg, 36.5 mg, 37 mg, 37.5 mg, 38 mg, 38.5 mg, 39 mg, 39.5 mg, 40 mg, 41 mg, 42 mg, 43 mg, 44 mg, 45 mg, 46 mg, 47 mg, 48 mg, 49 mg, 50 mg, 51 mg, 52 mg, 53 mg, 54 mg, 55 mg, 56 mg, 57 mg, 58 mg, 59 mg, 60 mg, 65 mg, 70 mg, 75 mg, 80 mg, 85 mg, 90 mg, 95 mg, 100 mg, 110 mg, 120 mg, 120 mg, 130 mg, 140 mg, 150 mg, 160 mg, 170 mg, 180 mg, 190 mg, 200 mg, 210 mg, 220 mg, 230 mg, 240 mg, 250 mg, 260 mg, 270 mg, 280 mg, 290 mg, 300 mg, 50 mg, 400 mg, 450 mg, 500 mg, 550 mg, 600 mg, six and 50 mg, 700 mg, 750 mg, 800 mg, 850 mg, 900 mg, 950 mg, or 1000 mg, or any range or combination thereof.

[0368] In some embodiments, a SNA disclosed herein is administered at a dose of at least or at least about 0.1 mg, 0.2 mg, 0.3 mg, 0.4 mg, 0.5 mg, 0.6 mg, 0.7 mg, 0.8 mg, 0.9 mg, 1 mg, 1.1 mg, 1.2 mg, 1.3 mg, 1.4 mg, 1.5 mg, 1.6 mg, 1.7 mg, 1.8 mg, 1.9 mg, 2 mg, 2.1 mg, 2.2 mg, 2.3 mg, 2.4 mg, 2.5 mg, 2.6 mg, 2.7 mg, 2.8 mg, 2.9 mg, 3 mg, 3.1 mg, 3.2 mg, 3.3 mg, 3.4 mg, 3.5 mg, 3.6 mg, 3.7 mg, 3.8 mg, 3.9 mg, 4 mg, 4.5 mg, 5 mg, 5.5 mg, 6 mg, 6.5 mg, 7 mg, 7.5 mg, 8 mg, 8.5 mg, 9 mg, 9.5 mg, 10 mg, 10.5 mg, 11 mg, 11.5 mg, 12 mg, 12.5 mg, 30 mg, 13.5 mg, 40 mg, 14.5 mg, 50 mg, 15.5 mg, 60 mg, 16.5 mg, 70 mg, 70.5 mg, 18 mg, 18.5 mg, 19 mg, 19.5 mg, 20 mg, 20.5 mg, 21 mg, 21.5 mg, 22 mg, 22.5 mg, 23 mg, 23.5 mg, 24 mg, 24.5 mg, 25 mg, 25.5 mg, 26 mg, 26.5 mg, 27 mg, 27.5 mg, 28 mg, 28.5 mg, 29 mg, 29.5 mg, 30 mg, 30.5 mg, 31 mg, 31.5 mg, 32 mg, 32.5 mg, 33 mg, 33.5 mg, 34 mg, 34.5 mg, 35 mg, 35.5 mg, 36 mg, 36.5 mg, 37 mg, 37.5 mg, 38 mg, 38.5 mg, 39 mg, 39.5 mg, 40 mg, 41 mg, 42 mg, 43 mg, 44 mg, 45 mg, 46 mg, 47 mg, 48 mg, 49 mg, 50 mg, 51 mg, 52 mg, 53 mg, 54 mg, 55 mg, 56 mg, 57 mg, 58 mg, 59 mg, 60 mg, 65 mg, 70 mg, 75 mg, 80 mg, 85 mg, 90 mg, 95 mg, 100 mg, 110 mg, 120 mg, 120 mg, 130 mg, 140 mg, 150 mg, 160 mg, 170 mg, 180 mg, 190 mg, 200 mg, 210 mg, 220 mg, 230 mg, 240 mg, 250 mg, 260 mg, 270 mg, 280 mg, 290 mg, 300 mg, 50 mg, 400 mg, 450 mg, 500 mg, 550 mg, 600 mg, 650 mg, 700 mg, 750 mg, 800 mg, 850 mg, 900 mg, 950 mg, or 1000 mg, or any range or combination thereof.

[0369] In some embodiments, a SNA disclosed herein is administered at a dose greater than or greater than about 0.1 mg, 0.2 mg, 0.3 mg, 0.4 mg, 0.5 mg, 0.6 mg, 0.7 mg, 0.8 mg, 0.9 mg, 1 mg, 1.1 mg, 1.2 mg, 1.3 mg, 1.4 mg, 1.5 mg, 1.6 mg, 1.7 mg, 1.8 mg, 1.9 mg, 2 mg, 2.1 mg, 2.2 mg, 2.3 mg, 2.4 mg, 2.5 mg, 2.6 mg, 2.7 mg, 2.8 mg, 2.9 mg, 3 mg, 3.1 mg, 3.2 mg, 3.3 mg, 3.4 mg, 3.5 mg, 3.6 mg, 3.7 mg, 3.8 mg, 3.9 mg, 4 mg, 4.5 mg, 5 mg, 5.5 mg, 6 mg, 6.5 mg, 7 mg, 7.5 mg, 8 mg, 8.5 mg, 9 mg, 9.5 mg, 10 mg, 10.5 mg, 11 mg, 11.5 mg, 12 mg, 12.5 mg, 30 mg, 13.5 mg, 40 mg, 14.5 mg, 50 mg, 15.5 mg, 60 mg, 16.5 mg, 70 mg, 70.5 mg, 18 mg, 18.5 mg, 19 mg, 19.5 mg, 20 mg, 20.5 mg, 21 mg, 21.5 mg, 22 mg, 22.5 mg, 23 mg, 23.5 mg, 24 mg, 24.5 mg, 25 mg, 25.5 mg, 26 mg, 26.5 mg, 27 mg, 27.5 mg, 28 mg, 28.5 mg, 29 mg, 29.5 mg, 30 mg, 30.5 mg, 31 mg, 31.5 mg, 32 mg, 32.5 mg, 33 mg, 33.5 mg, 34 mg, 34.5 mg, 35 mg, 35.5 mg, 36 mg, 36.5 mg, 37 mg, 37.5 mg, 38 mg, 38.5 mg, 39 mg, 39.5 mg, 40 mg, 41 mg, 42 mg, 43 mg, 44 mg, 45 mg, 46 mg, 47 mg, 48 mg, 49 mg, 50 mg, 51 mg, 52 mg, 53 mg, 54 mg, 55 mg, 56 mg, 57 mg, 58 mg, 59 mg, 60 mg, 65 mg, 70 mg, 75 mg, 80 mg, 85 mg, 90 mg, 95 mg, 100 mg, 110 mg, 120 mg, 130 mg, 140 mg, 150 mg, 160 mg, 170 mg, 180 mg, 190 mg, 200 mg, 210 mg, 220 mg, 230 mg, 240 mg, 250 mg, 260 mg, 270 mg, 280 mg, 290 mg, 300 mg, 50 mg, 400 mg, 450 mg, 500 mg, 550 mg, 600 mg, 650 mg, 700 mg, 750 mg, 800 mg, 850 mg, 900 mg, 950 mg, or 1000 mg, or any range or combination thereof.

[0370] As used herein, “pharmaceutically acceptable carrier or diluent” refers to any substance suitable for use in administering to an animal. Certain such carriers enable pharmaceutical compositions to be formulated as, for example, tablets, pills, dragees, capsules, liquids, gels, syrups, slurries, suspension and lozenges for the oral ingestion by a subject. In some embodiments, a pharmaceutically acceptable carrier or diluent is sterile water; sterile saline; or sterile buffer solution. In some embodiments, the pharmaceutically acceptable carrier or diluent is a gel formulation. In some embodiments, the gel formulation comprises one or more of the ingredients listed in Table 3.

TABLE 3

| Ingredients | w/w % |
|---|---|
| Transcutol P | 25.00 |
| Glycerin | 5.00 |
| Methylparaben | 0.15 |
| Propylparaben | 0.05 |
| HEC (250 HHX Pharm) | 1.00 |
| Purified Water (Part I) | 5.00 |
| Monobasic Sodium Phosphate, Anhydrous | 0.037 |
| Dibasic Sodium Phosphate, Anhydrous | 0.31 |
| Sodium Metabisulfite | 0.20 |
| Disodium EDTA | 0.10 |
| Sodium Citrate | 0.25 |
| DOPC Liposomes | 5.89 |
| Purified Water (Part II) | 57.00 |
| Oligonucleotide | 0.28 |
| Sodium Hydroxide Solution, 10% (w/w) | Adjust pH to 7.5-8.0 |
| Diluted Hydrochloric Acid, 10% (w/v) | Adjust pH to 7.5-8.0 |
| Purified Water (Part III) | To 100.00 |

[0371] In some embodiments, the gel formulation consists of the ingredients listed in Table 3.

[0372] As used herein, “pharmaceutically acceptable salts” means physiologically and pharmaceutically acceptable salts of compounds, such as oligomeric compounds, i.e., salts that retain the desired biological activity of the parent compound and do not impart undesired toxicological effects thereto.

[0373] As used herein, “pharmaceutical composition” means a mixture of substances suitable for administering to a subject. For example, a pharmaceutical composition may comprise an antisense compound and a sterile aqueous solution. In some embodiments, a pharmaceutical composition shows activity in free uptake assay in certain cell lines.

[0374] For use in therapy, an effective amount of the SNAs can be administered to a subject by any mode that delivers the SNAs to the desired cell. Administering pharmaceutical compositions may be accomplished by any means known to the skilled artisan. Routes of administration include but are not limited to oral, intrathecal, respiratory, parenteral, intramuscular, intravenous, subcutaneous, mucosal, intranasal, sublingual, intratracheal, inhalation, ocular, vaginal, dermal, or rectal administration, and by direct injection.

[0375] In some embodiments, the intrathecal administration is through a lumbar puncture. (See e.g., Astrid et al. European Journal of Paediatric Neurology (2018) 22(1):122-7 and Hach6 et al. Journal of Child Neurology 31.7 (2016):899-906, the contents of which are incorporated by reference in their entirety).

[0376] In some embodiments, any of the SNAs described herein are delivered intrathecally (IT). In some embodiments, any of the SNAs described herein are in a formulation that is compatible with intrathecal administration. Non-limiting examples of formulations that are compatible with intrathecal administration include artificial cerebral spinal fluid (aCSF); 100 mM sodium phosphate, 150 mM NaCl, 0.001% P 80; 10 mM citrate, 150 mM NaCl; 5% dextran in saline (hyperbaric solution); 0.75% or 7.5% glucose; paraben (methyl—and propylparabens); glycerin (50%); isotonic mannitol in normal saline; EDTA; DepoFoam; PEG suspension 2.5% PEG (3400); and 0.9% NaCl with 2.5% PEG and 0.025% polysorbate 80. Other formulations that are known to one of ordinary skill in the art are also contemplated herein.

[0377] In some embodiments, the disease or disorder is cancer. In some embodiments, the cancer is selected from the group consisting of melanoma, renal cancer, clear cell carcinoma, prostate cancer, hormone refractory prostate adenocarcinoma, breast cancer, colon cancer, lung cancer, non-small cell lung cancer, small cell lung cancer, bone cancer, pancreatic cancer, pancreatic adenocarcinoma, skin cancer, cancer of the head or neck, cutaneous or intraocular malignant melanoma, uterine cancer, ovarian cancer, rectal cancer, stomach cancer, testicular cancer, thyroid cancer, anaplastic thyroid cancer, uterine cancer, carcinoma of the fallopian tubes, carcinoma of the endometrium, carcinoma of the cervix, Hodgkin's Disease, non-Hodgkin's lymphoma, cancer of the esophagus, cancer of the small intestine, cancer of the endocrine system, cancer of the thyroid gland, cancer of the parathyroid gland, cancer of the adrenal gland, sarcoma of soft tissue, cancer of the urethra, chronic or acute leukemias including acute myeloid leukemia, chronic myeloid leukemia, acute lymphoblastic leukemia, chronic lymphocytic leukemia, solid tumors of childhood, lymphocytic lymphoma, cancer of the bladder, cancer of the kidney or ureter, carcinoma of the renal pelvis, neoplasm of the central nervous system (CNS), primary CNS lymphoma, tumor angiogenesis, spinal axis tumor, brain stem glioma, pituitary adenoma, Kaposi's sarcoma, epidermoid cancer, squamous cell cancer, T-cell lymphoma, biliary tract cancer, brain cancer, breast cancer, cervical cancer, choriocarcinoma, esophageal cancer, gastric cancer, an intraepithelial neoplasm, lymphoma, liver cancer, neuroblastoma, oral cancer, sarcoma, hairy cell leukemia, chronic myelogenous leukemia, cutaneous T-cell leukemia, multiple myeloma, renal cell carcinoma, lymphoma, bladder cancer, glioblastoma multiforme, Merkel cell carcinoma, cutaneous squamous cell carcinoma, melanoma or squamous cell carcinoma of the head and neck. In some embodiments, the cancer is environmentally-induced cancers, including those induced by asbestos, or any combinations thereof. In some embodiments, the cancer is not melanoma.

[0378] In some embodiments, the cancer is selected from the group consisting of pleomorphic sarcoma, gastrointestinal stromal tumor (GIST), liposarcoma, leiomyosarcoma, synovial sarcoma, malignant peripheral nerve sheath tumor, rhabdomyosarcoma, angiosarcoma, fibrosarcoma, dermatofibrosarcoma protuberans, epithelioid sarcoma, myxoma, mesenchymoma, vascular sarcoma, neurilemmoma, bone sarcoma, osteosarcoma, Ewing's sarcoma, chondrosarcoma, Kaposi sarcoma, solitary fibrous tumor, chordoma, desmoid-type fibromatosis, fibroblastic sarcoma, giant cell tumor of the bone, gynaecological sarcoma, soft tissue sarcoma, angioleiomyoma, leiomyoma, smooth muscle sarcoma, fibrohistiocytic sarcoma, sebaceous cell carcinoma and eccrine carcinoma. In some embodiments, the cancer is characterized as microsatellite instability high, or MSI-H, or mismatch repair deficient, or dMMR. MSI-H or dMMR cancers are characterized by defects in DNA replication, particularly in the microsatellite regions. The presence of MSI-H and dMMR tumors has been reported in diverse cancer types, including colon, colorectal, endometrial, biliary, gastric, gastroesophageal junction, pancreatic, small intestinal, breast, triple negative breast, prostate, bladder, esophageal, sarcoma, thyroid, retroperitoneal adenocarcinoma, small cell lung, ovarian, pancreatic, prostate, central nervous system, and non-small cell lung cancers.

[0379] In some embodiments, the disease or disorder is an inflammatory disease or disorder.

[0380] In some embodiments, the inflammatory disease or disorder is selected from the group consisting of an autoimmune disease, an infectious disease, transplant rejection or graft-versus-host disease, a pulmonary disorder, an intestinal disorder, a cardiac disorder, sepsis, a spondyloarthropathy, a metabolic disorder, a hepatic disorder, a skin disorder and a nail disorder.

[0381] In some embodiments, the inflammatory disease or disorder is selected from the group consisting of atopic dermatitis, epidermolysis bullosa, uveitis, gout, polymyalgia rheumatica, osteoarthritis, systemic-onset juvenile idiopathic arthritis, schnitzler syndrome, familial mediterranean fever, cryopyrin-associated periodic syndrome (CAPS), hyper-igd syndrome (HIDS), TNF receptor-associated periodic syndrome (TRAPs), type 2 diabetes, proliferative diabetic retinopathy, wet age-related macular degeneration, chronic obstructive pulmonary disease, type 1 diabetes, pyoderma gangrenosum, dry eye syndrome, and acne vulgaris, rheumatoid arthritis, psoriasis, psoriatic arthritis, psoriasis in combination with psoriatic arthritis, ulcerative colitis, Crohn's disease, vasculitis. Behcet's disease, ankylosing spondylitis, asthma, chronic obstructive pulmonary disorder (COPD), idiopathic pulmonary fibrosis (IPF), restenosis, anemia, pain and hepatitis C virus infection.

[0382] In some embodiments, the autoimmune disease is selected from the group consisting of rheumatoid arthritis, rheumatoid spondylitis, osteoarthritis, gouty arthritis, allergy, multiple sclerosis, autoimmune uveitis, and nephritic syndrome.

[0383] The term “effective amount” is used interchangeably with the term “therapeutically effective amount” and refers to the amount of at least one SNA described herein, at dosages and for periods of time necessary to achieve the desired therapeutic result, for example, to reduce or stop at least one symptom of a disease or disorder related to an abnormality in splice modulation, for instance a disease or disorder disclosed in Table 1. For example, an effective amount using the methods as disclosed herein would be considered as the amount sufficient to reduce a symptom of the disease or disorder related to an abnormality in splice modulation by at least 10%. An effective amount as used herein would also include an amount sufficient to prevent or delay the development of a symptom of the disease, alter the course of a symptom disease (for example but not limited to, slow the progression of a symptom of the disease), or reverse a symptom of the disease or disorder. Accordingly, the term “effective amount” or “therapeutically effective amount” as used herein refers to the amount of a pharmaceutical composition described herein to alleviate at least one symptom of a disease or disorder associated with or related to an abnormality in splice modulation. Stated another way, “therapeutically effective amount” of an antisense oligonucleotide SNA as disclosed herein is the amount of SNA which exerts a beneficial effect on, for example, the symptoms of a disease or disorder related to an abnormality in splice modulation. The dosage administered, as single or multiple doses, to an individual will vary depending upon a variety of factors, including pharmacokinetic properties of the SNA, the route of administration, conditions and characteristics (sex, age, body weight, health, size) of subjects, extent of symptoms, concurrent treatments, frequency of treatment and the effect desired. A therapeutically effective amount is also one in which any toxic or detrimental effects of the therapeutic agent are outweighed by the therapeutically beneficial effects. The effective amount in each individual case can be determined empirically by a skilled artisan according to established methods in the art and without undue experimentation. In general, the phrases “therapeutically-effective” and “effective for the treatment, prevention, or inhibition”, are intended to qualify the antisense oligonucleotide SNA as disclosed herein which will achieve the goal of reduction in the severity of at least one symptom of a disease or disorder related to an abnormality in splice modulation.

[0384] According to some aspects, methods for delivering a stable level of antisense oligonucleotides to a central nervous system (CNS) of a subject having a CNS disease or disorder are contemplated herein. In some embodiments, the method comprises administering to a subject having a neurodegenerative disease or disorder a spherical nucleic acid (SNA) in an effective amount to deliver antisense oligonucleotides to the CNS of the subject, wherein the administration of SNA delivers about 2% to about 150% more antisense oligonucleotides to one or more tissues or regions of the CNS of the subject than administration of linear antisense oligonucleotides that are not in a SNA, wherein the SNA comprises a core and antisense oligonucleotides comprised of 10 to 60 linked nucleosides in length, wherein the antisense oligonucleotides are attached to the core and thus form an oligonucleotide shell, wherein the CNS disease or disorder is not autism, Alzheimer's disease, Parkinson's disease, spinal muscular atrophy, or characterized by muscle wasting and loss of muscle function.

[0385] According to some aspects, methods are disclosed for delivering a stable level of antisense oligonucleotides to a central nervous system (CNS) of a subject having a CNS disease or disorder comprises administering to a subject having a neurodegenerative disease or disorder a spherical nucleic acid (SNA) in an effective amount to deliver a first antisense oligonucleotide and a second antisense oligonucleotide to the CNS of the subject, wherein the administration of SNA delivers about 2% to about 150% more antisense oligonucleotides to one or more tissues or regions of the CNS of the subject than administration of linear antisense oligonucleotides that are not in a SNA, wherein the SNA comprises a core and antisense oligonucleotides comprised of 10 to 60 linked nucleosides in length, wherein the antisense oligonucleotides are attached to the core and thus form an oligonucleotide shell.

[0386] According to some aspects, methods are disclosed for delivering a stable level of antisense oligonucleotides to a central nervous system (CNS) of a subject having a CNS disease or disorder, the method comprising administering to a subject having a neurodegenerative disease or disorder a first spherical nucleic acid (SNA) in an effective amount to deliver a first antisense oligonucleotide and a second SNA to deliver a second antisense oligonucleotide to the CNS of the subject, wherein the administration of SNA delivers about 2% to about 150% more antisense oligonucleotides to one or more tissues or regions of the CNS of the subject than administration of linear antisense oligonucleotides that are not in a SNA, wherein the SNA comprises a core and antisense oligonucleotides comprised of 10 to 60 linked nucleosides in length, wherein the antisense oligonucleotides are attached to the core and thus form an oligonucleotide shell.

[0387] In some embodiments, the CNS disease or disorder is SMA.

[0388] In some embodiments, the CNS disease or disorder is encephalitis, poliomyelitis, essential tremor, multiple sclerosis, cancer of the nervous system, addiction, attention deficit/hyperactivity disorder (ADHD), bipolar disorder, catalepsy, depression, epilepsy/seizures, infection, locked-in syndrome, meningitis, migraine, myelopathy or Tourette's syndrome.

[0389] In some embodiments, the SNA is administered intrathecally (IT). In some embodiments, the SNA is administered in the lower lumbar region. In some embodiments, the SNA is IT-administered through a lumbar puncture.

[0390] In some embodiments, the subject is a mammal. In some embodiments, the subject is a rat or mouse. In some embodiments, the subject is a human.

[0391] In some embodiments, a stable level is achieved when at least 50% of the antisense oligonucleotides are present in a tissue of the CNS within three days of administration of the SNA to the subject, relative to the amount of antisense oligonucleotides present in the tissue of the CNS within one hour of administration of the SNA to the subject. In some embodiments, a stable level is achieved when at least 50% of the antisense oligonucleotides are present in a tissue of the CNS within 48 hours of administration of the SNA to the subject, relative to the amount of antisense oligonucleotides present in the tissue of the CNS within one hour of administration of the SNA to the subject. In some embodiments, a stable level is achieved when at least 50% of the antisense oligonucleotides are present in a tissue of the CNS within 24 hours of administration of the SNA to the subject, relative to the amount of antisense oligonucleotides present in the tissue of the CNS within one hour of administration of the SNA to the subject.

[0392] In some embodiments, less than 50% of the antisense oligonucleotides are detectable within six hours of administration to the subject in one or both kidneys of the subject. In some embodiments, less than 40% of the antisense oligonucleotides are detectable within six hours of administration to the subject in one or both kidneys of the subject. In some embodiments, less than 30% of the antisense oligonucleotides are detectable within six hours of administration to the subject in one or both kidneys of the subject. In some embodiments, less than 20% of the antisense oligonucleotides are detectable within six hours of administration to the subject in one or both kidneys of the subject. In some embodiments, less than 10% of the antisense oligonucleotides are detectable within six hours of administration to the subject in one or both kidneys of the subject. In some embodiments, less than 5% of the antisense oligonucleotides are detectable within six hours of administration to the subject in one or both kidneys of the subject.

[0393] In some embodiments, the SNA is a SNA disclosed herein.

[0394] In some embodiments, the SNA is in a formulation and wherein the formulation comprises artificial cerebral spinal fluid (aCSF).

[0395] In some embodiments, the one or more tissues or regions of the CNS is one or more regions of the brain.

[0396] In some embodiments, the one or more regions of the brain is selected from the group consisting of the amygdala, basal ganglia, cerebellum, corpus callosum, cortex, hippocampus, hypothalamus, midbrain, olfactory region, one or more ventricles, septal area, white matter and thalamus.

[0397] In some embodiments, the one or more tissues or regions of the CNS are the cervical cerebral spinal fluid (CSF) or thoracic CSF.

[0398] In some embodiments, the antisense oligonucleotides in the SNA have different routes of distribution and clearance from the corresponding linear antisense oligonucleotides that are not in a SNA.

[0399] In some embodiments, any of the SNAs described herein are administered to a subject having a disease or disorder disclosed herein in an effective amount to increase expression levels of a protein or mRNA of interest over a baseline level of a protein or mRNA of interest to treat the disease or disorder in the subject, wherein the effective amount of SNA is less than 12 mg/dose. In some embodiments, the effective amount of SNA is less than 11.5 mg/dose, 11 mg/dose, 10.5 mg/dose, 10 mg/dose, 9.5 mg/dose, 9 mg/dose, 8.5 mg/dose, 8 mg/dose, 7.5 mg/dose, 7 mg/dose, 6.5 mg/dose, 6 mg/dose, 5.5 mg/dose, 5 mg/dose, 4.5 mg/dose, 3.5 mg/dose, 3 mg/dose, 2.5 mg/dose, 2 mg/dose, 1.5 mg/dose, 1 mg/dose, 0.5 mg/dose, or 0.1 mg/dose. In some embodiments, the SNA is administered to the CNS to treat a CNS disease or disorder.

[0400] In some embodiments, any of the SNAs described herein are administered to a subject having a disease or disorder disclosed herein in an effective amount to increase expression levels of a protein or mRNA of interest over a baseline level of a protein or mRNA of interest to treat the disease or disorder in the subject, wherein the effective amount of SNA is less than 12 mg/kg of body weight. In some embodiments, the effective amount of SNA is less than 11.5 mg/kg of body weight, 11 mg/kg of body weight, 10.5 mg/kg of body weight, 10 mg/kg of body weight, 9.5 mg/kg of body weight, 9 mg/kg of body weight, 8.5 mg/kg of body weight, 8 mg/kg of body weight, 7.5 mg/kg of body weight, 7 mg/kg of body weight, 6.5 mg/kg of body weight, 6 mg/kg of body weight, 5.5 mg/kg of body weight, 5 mg/kg of body weight, 4.5 mg/kg of body weight, 3.5 mg/kg of body weight, 3 mg/kg of body weight, 2.5 mg/kg of body weight, 2 mg/kg of body weight, 1.5 mg/kg of body weight, 1 mg/kg of body weight, 0.5 mg/kg of body weight, or 0.1 mg/kg of body weight. In some embodiments, the SNA is administered to the CNS to treat a CNS disease or disorder.

[0401] In some embodiments, any of the SNAs described herein are administered to a subject having a disease or disorder disclosed herein in an effective amount to increase expression levels of a protein or mRNA of interest over a baseline level of a protein or mRNA of interest to treat the disease or disorder in the subject, wherein the effective amount of SNA is more than 12 mg/dose. In some embodiments, the effective amount of SNA is more than 12.5 mg/dose, 13 mg/dose, 13.5 mg/dose, 14 mg/dose, 14.5 mg/dose, 15 mg/dose, 15.5 mg/dose, 16 mg/dose, 16.5 mg/dose, 17 mg/dose, 17.5 mg/dose, 18 mg/dose, 18.5 mg/dose, 19 mg/dose, 19.5 mg/dose, 20 mg/dose, 22 mg/dose, 24 mg/dose, 26 mg/dose, 28 mg/dose, 30 mg/dose, 40 mg/dose, 50 mg/dose, 60 mg/dose, 70 mg/dose, 80 mg/dose, 90 mg/dose, 100 mg/dose, 500 mg/dose, or 1000 mg/dose. In some embodiments, the SNA is administered to the CNS to treat a CNS disease or disorder.

[0402] In some embodiments, any of the SNAs described herein are administered to a subject having a disease or disorder disclosed herein in an effective amount to increase expression levels of a protein or mRNA of interest over a baseline level of a protein or mRNA of interest to treat the disease or disorder in the subject, wherein the effective amount of SNA is more than 12 mg/kg of body weight. In some embodiments, the effective amount of SNA is more than 12.5 mg/kg of body weight, 13 mg/kg of body weight, 13.5 mg/kg of body weight, 14 mg/kg of body weight, 14.5 mg/kg of body weight, 15 mg/kg of body weight, 15.5 mg/kg of body weight, 16 mg/kg of body weight, 16.5 mg/kg of body weight, 17 mg/kg of body weight, 17.5 mg/kg of body weight, 18 mg/kg of body weight, 18.5 mg/kg of body weight, 19 mg/kg of body weight, 19.5 mg/kg of body weight, 20 mg/kg of body weight, 22 mg/kg of body weight, 24 mg/kg of body weight, 26 mg/kg of body weight, 28 mg/kg of body weight, 30 mg/kg of body weight, 40 mg/kg of body weight, 50 mg/kg of body weight, 60 mg/kg of body weight, 70 mg/kg of body weight, 80 mg/kg of body weight, 90 mg/kg of body weight, 100 mg/kg of body weight, 500 mg/kg of body weight, or 1000 mg/kg of body weight. In some embodiments, the SNA is administered to the CNS to treat a CNS disease or disorder.

[0403] In some embodiments, any of the SNAs described herein are administered to a subject having a disease or disorder disclosed herein in an effective amount to increase expression levels of a protein or mRNA of interest over a baseline level of a protein or mRNA of interest to treat the disease or disorder in the subject, wherein the effective amount of SNA is or about 0.1 mg/dose, 0.2 mg/dose, 0.3 mg/dose, 0.4 mg/dose, 0.5 mg/dose, 0.6 mg/dose, 0.7 mg/dose, 0.8 mg/dose, 0.9 mg/dose, 1 mg/dose, 1.5 mg/dose, 2 mg/dose, 2.5 mg/dose, 3 mg/dose, 3.5 mg/dose, 4 mg/dose, 4.5 mg/dose, 5 mg/dose, 5.5 mg/dose, 6 mg/dose, 6.5 mg/dose, 7 mg/dose, 7.5 mg/dose, 8 mg/dose, 8.5 mg/dose, 9 mg/dose, 9.5 mg/dose, 10 mg/dose, 10.5 mg/dose, 11 mg/dose, 11.5 mg/dose, 12 mg/dose, 12.5 mg/dose, 13 mg/dose, 13.5 mg/dose, 14 mg/dose, 14.5 mg/dose, 15 mg/dose, 15.5 mg/dose, 16 mg/dose, 16.5 mg/dose, 17 mg/dose, 17.5 mg/dose, 18 mg/dose, 18.5 mg/dose, 19 mg/dose, 19.5 mg/dose, 20 mg/dose, 20.5 mg/dose, 21 mg/dose, 21.5 mg/dose, 22 mg/dose, 23 mg/dose, 24 mg/dose, 25 mg/dose, 26 mg/dose, 27 mg/dose, 28 mg/dose, 29 mg/dose, 30 mg/dose, 31 mg/dose, 32 mg/dose, 33 mg/dose, 34 mg/dose, 35 mg/dose, 36 mg/dose, 37 mg/dose, 38 mg/dose, 39 mg/dose, 40 mg/dose, 45 mg/dose, 50 mg/dose, 55 mg/dose, 60 mg/dose, 65 mg/dose, 70 mg/dose, 75 mg/dose, 80 mg/dose, 85 mg/dose, 90 mg/dose, 95 mg/dose, 100 mg/dose, 500 mg/dose, 1000 mg/dose or any range there of or combination thereof. In some embodiments, the SNA is administered to the CNS to treat a CNS disease or disorder.

[0404] In some embodiments, any of the SNAs described herein are administered to a subject having a disease or disorder disclosed herein in an effective amount to increase expression levels of a protein or mRNA of interest over a baseline level of a protein or mRNA of interest in the CNS of the subject to treat the disease or disorder in the subject, wherein the effective amount of SNA is or about 0.1 mg/kg of body weight, 0.2 mg/kg of body weight, 0.3 mg/kg of body weight, 0.4 mg/kg of body weight, 0.5 mg/kg of body weight, 0.6 mg/kg of body weight, 0.7 mg/kg of body weight, 0.8 mg/kg of body weight, 0.9 mg/kg of body weight, 1 mg/kg of body weight, 1.5 mg/kg of body weight, 2 mg/kg of body weight, 2.5 mg/kg of body weight, 3 mg/kg of body weight, 3.5 mg/kg of body weight, 4 mg/kg of body weight, 4.5 mg/kg of body weight, 5 mg/kg of body weight, 5.5 mg/kg of body weight, 6 mg/kg of body weight, 6.5 mg/kg of body weight, 7 mg/kg of body weight, 7.5 mg/kg of body weight, 8 mg/kg of body weight, 8.5 mg/kg of body weight, 9 mg/kg of body weight, 9.5 mg/kg of body weight, 10 mg/kg of body weight, 10.5 mg/kg of body weight, 11 mg/kg of body weight, 11.5 mg/kg of body weight, 12 mg/kg of body weight, 12.5 mg/kg of body weight, 13 mg/kg of body weight, 13.5 mg/kg of body weight, 14 mg/kg of body weight, 14.5 mg/kg of body weight, 15 mg/kg of body weight, 15.5 mg/kg of body weight, 16 mg/kg of body weight, 16.5 mg/kg of body weight, 17 mg/kg of body weight, 17.5 mg/kg of body weight, 18 mg/kg of body weight, 18.5 mg/kg of body weight, 19 mg/kg of body weight, 19.5 mg/kg of body weight, 20 mg/kg of body weight, 20.5 mg/kg of body weight, 21 mg/kg of body weight, 21.5 mg/kg of body weight, 22 mg/kg of body weight, 23 mg/kg of body weight, 24 mg/kg of body weight, 25 mg/kg of body weight, 26 mg/kg of body weight, 27 mg/kg of body weight, 28 mg/kg of body weight, 29 mg/kg of body weight, 30 mg/kg of body weight, 31 mg/kg of body weight, 32 mg/kg of body weight, 33 mg/kg of body weight, 34 mg/kg of body weight, 35 mg/kg of body weight, 36 mg/kg of body weight, 37 mg/kg of body weight, 38 mg/kg of body weight, 39 mg/kg of body weight, 40 mg/kg of body weight, 45 mg/kg of body weight, 50 mg/kg of body weight, 55 mg/kg of body weight, 60 mg/kg of body weight, 65 mg/kg of body weight, 70 mg/kg of body weight, 75 mg/kg of body weight, 80 mg/kg of body weight, 85 mg/kg of body weight, 90 mg/kg of body weight, 95 mg/kg of body weight, 100 mg/kg of body weight, 500 mg/kg of body weight, 1000 mg/kg of body weight or any range or combination thereof.

[0405] In some embodiments, at least two doses of any of the SNAs disclosed herein are administered to a subject having a disease or disorder disclosed herein in an effective amount to increase expression levels of a protein or mRNA of interest over a baseline level. In some embodiments, the second dose is administered about one day, two days, three days, four days, five days, six days, seven days, eight days, nine days, 10 days, 11 days, 12 days, 13 days, 14 days, 15 days, 16 days, 17 days, 18 days, 19 days, 20 days, 21 days, 22 days, 23 days, 24 days, 25 days, 26 days, 27 days, 27 days, 28 days, 29 days, 30 days, 31 days after the first dose. In some embodiments, the second dose is administered 15 days to about three months after the first dose. In some embodiments, the second dose is administered about 2 weeks, 3 weeks, 4 weeks, 5 weeks, 6 weeks, 7 weeks, 8 weeks, 2.5 months, 3 months, 3.5 months, 4 months, 4.5 months, 5 months, 5.5 months, 6 months, 6.5 months, 7 months, 7.5 months, 8 months, 8.5 months, 9 months, 9.5 months, 10 months, 10.5 months, 11 months, 11.5 months, 12 months, 1.5 years, 2 years, 2.5 years, 3 years, 3.5 years, 4 years, 4.5 years, 5 years, 5.5 years, 6 years, 6.5 years, 7 years, 7.5 years, 8 years, 8.5 years, 9 years, 9.5 years, or 10 years after administration of the first dose.

[0406] In some embodiments, two or more doses of a SNA disclosed herein are administered at intervals of or about one day, two days, three days, four days, five days, six days, seven days, eight days, nine days, 10 days, 11 days, 12 days, 13 days, 14 days, 15 days, 16 days, 17 days, 18 days, 19 days, 20 days, 21 days, 22 days, 23 days, 24 days, 25 days, 26 days, 27 days, 27 days, 28 days, 29 days, 30 days, 31 days, 2 weeks, 3 weeks, 4 weeks, 5 weeks, 6 weeks, 7 weeks, 8 weeks, 2.5 months, 3 months, 3.5 months, 4 months, 4.5 months, 5 months, 5.5 months, 6 months, 6.5 months, 7 months, 7.5 months, 8 months, 8.5 months, 9 months, 9.5 months, 10 months, 10.5 months, 11 months, 11.5 months, 12 months, 1.5 years, 2 years, 2.5 years, 3 years, 3.5 years, 4 years, 4.5 years, 5 years, 5.5 years, 6 years, 6.5 years, 7 years, 7.5 years, 8 years, 8.5 years, 9 years, 9.5 years, or 10 years or more than 10 years, or any ranges or combinations thereof.

[0407] In some embodiments, an effective amount refers to the amount that is able to deliver about 2% to about 150% more antisense oligonucleotides to one or more tissues or regions of the body of the subject than administration of a linear antisense oligonucleotide that is not in an SNA. In some embodiments, a SNA delivers about 2% to about 500%, about 2% to about 450%, about 2% to about 400%, about 2% to about 350%, about 2% to about 300%, about 2% to about 250%, about 2% to about 200%, about 2% to about 175%, about 2% to about 160%, about 2% to about 150%, about 2% to about 140%, about 2% to about 130%, about 2% to about 120%, about 2% to about 110%, about 2% to about 100%, about 2% to about 95%, about 2% to about 90% about 2% to about 85% to about 2% to about 80%, about 2% to about 75%, about 2% to about 70%, about 2% to about 65%, about 2% to about 60%, about 2% to about 55%, about 2% to about 50%, about 2% to about 45% to about 2% to about 40%, about 2% to about 35%, about 2% to about 30%, about 2% to about 25%, about 2% to about 20%, about 2% to about 15%, about 2% to about 10%, about 2% to about 5%, about 10% to about 500%, about 10% to about 450%, about 10% to about 400%, about 10% to about 350%, about 10% to about 300%, about 10% to about 250%, about 10% to about 200%, about 10% to about 175%, about 10% to about 160%, about 10% to about 150%, about 10% to about 140%, about 10% to about 130%, about 10% to about 120%, about 10% to about 110%, about 10% to about 100%, about 10% to about 95%, about 10% to about 90% about 10% to about 85% to about 10% to about 80%, about 10% to about 75%, about 10% to about 70%, about 10% to about 65%, about 10% to about 60%, about 10% to about 55%, about 10% to about 50%, about 10% to about 45% to about 10% to about 40%, about 10% to about 35%, about 10% to about 30%, about 10% to about 25%, about 10% to about 20%, about 10% to about 15%, about 10% to about 10%, about 10% to about 5% more antisense oligonucleotides to one or more tissues or regions of the body of the subject than administration of a linear antisense oligonucleotide that is not in an SNA.

[0408] In an embodiment, a second dose of SNA is administered one week to three weeks after the first dose of SNA, a third dose of SNA is administered one week to three weeks after the second dose of SNA, a fourth dose is administered two weeks to six weeks after the third dose of SNA, a fifth and subsequent doses of SNA are administered between two and six months after the preceding dose. In some embodiments, all the SNA doses are administered at the same or substantially the same time intervals. As disclosed herein, substantially the same time intervals refers to administration within three days of each other. In some embodiments, at least two of the SNA doses are administered at the same time interval and any remaining SNA doses at different time intervals, such as at any combination of the time intervals disclosed herein.

[0409] In some embodiments, any of the SNAs described herein are administered in an effective amount to deliver a stable level of the antisense oligonucleotides to the CNS of the subject. In some embodiments, the stable level of the antisense oligonucleotides is achieved when at least 50% of the antisense oligonucleotides are present in one or more tissues or one or more regions of the CNS of the subject within seven days of administration of the SNA to the subject, relative to the amount of antisense oligonucleotides present in the tissue of the CNS within one hour of administration of the SNA to the subject. In some embodiments, the stable level of the antisense oligonucleotides is achieved when at least 10%, 15%, 20%, 25%, 30%, 35%, 40%, 45%, 50%, 55%, 60%, 65%, 70%, 75%, 80%, 85%, 90%, 95%, or 100% of the antisense oligonucleotides are present in one or more tissues or one or more regions of the CNS of the subject within 6 hours, 18 hours, 24 hours, 48 hours, 72 hours, 4 days, 5 days, 6 days, 7 days, 8 days, 9 days, 10 days, 12 days, 14 days, 60 days, 18 days, 20 days, 22 days, 24 days, 26 days, 28 days, 30 days, 1.5 months, 2 months, 2.5 months, 3 months, 3.5 months, 4 months, 4.5 months, 5 months, 5.5 months, 6 months, 6.5 months, 7 months, 7.5 months, 8 months, 8.5 months, 9 months, 9.5 months, 10 months, 10.5 months, 11 months, 11.5 months, 1 year, 1.5 years, 2 years, 2.5 years, 3 years, 3.5 years, 4 years, 4.5 years, 5 years, 6 years, 7 years, 8 years, 9 years, or 10 years of administration of the SNA to the subject, relative to the amount of antisense oligonucleotides present in the tissue of the CNS within 1 hour, 3 hours, 6 hours, 12 hours, or 24 hours of administration of the SNA to the subject.

[0410] In some embodiments less than 50% of the oligonucleotides or antisense oligonucleotides in any of the SNA disclosed herein are detectable within six hours of administration to the subject in one or both kidneys of the subject. In some embodiments, less than 100%, 95%, 90%, 85%, 80%, 75%, 70%, 65%, 60%, 55%, 50%, 45%, 40%, 35%, 30%, 25%, 20%, 15%, 10%, 5%, or 1% of the oligonucleotides or antisense oligonucleotides in any of the SNA described herein are detectable within 30 min., 1 hour, 2 hours, 3 hours, 4 hours, 5 hours, 6 hours, 12 hours, 18 hours, 24 hours, 48 hours, 72 hours, 4 days, 5 days, 6 days, 7 days, 8 days, 9 days, 10 days, 12 days, 14 days, 16 days, 18 days, 20 days, 22 days, 24 days, 26 days, 28 days, 30 days, 1.5 months, 2 months, 2.5 months, 3 months, 3.5 months, 4 months, 4.5 months, 5 months, 5.5 months, 6 months, 6.5 months, 7 months, 7.5 months, 8 months, 8.5 months, 9 months, 9.5 months, 10 months, 10.5 months, 11 months, 11.5 months, 1 year, 1.5 years, 2 years, 2.5 years, 3 years, 3.5 years, 4 years, 4.5 years, 5 years, 6 years, 7 years, 8 years, 9 years, or 10 years of administration to the subject in one or both kidneys of the subject.

[0411] In some embodiments, the duration of the method for treating a disease or disorder disclosed herein with a SNA disclosed herein is for three months, for six months, for nine months, for one year, for 1.5 years, for two years, for 2.5 years, for 3 years, for 3.5 years, for 4 years, for 4.5 years, for 5 years, for 5.5 years, for 6 years, for 6.5 years, for 7 years, for 7.5 years, for 8 years, for 8.5 years, for 9 years, for 9.5 years, for 10 years, for 15 years, for 20 years or more than 20 years.

[0412] The phrases “parenteral administration” and “administered parenterally” as used herein means modes of administration other than enteral and topical administration, usually by injection, and includes, without limitation, intravenous, intramuscular, intraarterial, intrathecal, intraventricular, intracapsular, intraorbital, intracardiac, intradermal, intraperitoneal, transtracheal, subcutaneous, subcuticular, intraarticular, sub capsular, subarachnoid, intraspinal, intracerebro spinal, and intrasternal injection, infusion and other injection or infusion techniques, without limitation. The phrases “systemic administration,” “administered systemically”, “peripheral administration” and “administered peripherally” as used herein mean the administration of a pharmaceutical composition comprising at least an SNA as disclosed herein such that it enters the animal's system and, thus, is subject to metabolism and other like processes, for example, subcutaneous administration.

[0413] In some embodiments, a SNA described herein is administered to a cell in vitro or is administered to a subject in order for the SNA to come into contact with a cell of the subject in vivo. Non-limiting examples of a cell contemplated herein include a fibroblast, epithelial, endothelial, neuronal, adipose, cardiac, skeletal muscle, immune cell, hepatic, splenic, lung, circulating blood, gastrointestinal, renal, bone marrow, or pancreatic cell. The cell is from a somatic tissue including, but not limited to brain, liver, lung, gut, stomach, intestine, fat, muscle, uterus, skin, spleen, endocrine organ, bone, etc. In some embodiments, the cell is a mammalian cell. In some embodiments, the cell is a murine, bovine, simian, porcine, equine, ovine, or human cell.

[0414] In some embodiments, the cell is contacted with a SNA disclosed herein in vitro. In some embodiments, the cell is contacted with a SNA disclosed herein in vivo. In some embodiments, the cell is contacted with a SNA disclosed herein ex vivo.

[0415] As used herein, the terms “treat,” “treatment,” “treating,” or “amelioration” refer to therapeutic treatments, wherein the object is to reverse, alleviate, ameliorate, inhibit, slow down or stop the progression or severity of a condition associated with, a disease or disorder. The term “treating” includes reducing or alleviating at least one adverse effect or symptom of a condition, disease or disorder associated with or related to an abnormality in splice modulation. The Treatment is generally “effective” if one or more symptoms or clinical markers are reduced. Alternatively, treatment is “effective” if the progression of a disease is reduced or halted. That is, “treatment” includes not just the improvement of symptoms or markers, but can also include a cessation or at least slowing of progress or worsening of symptoms that would be expected in absence of treatment. Beneficial or desired clinical results include, but are not limited to, alleviation of one or more symptom(s) of a malignant disease, diminishment of extent of a malignant disease, stabilized (i.e., not worsening) state of a malignant disease, delay or slowing of progression of a malignant disease, amelioration or palliation of the malignant disease state, and remission (whether partial or total), whether detectable or undetectable. The term “treatment” of a disease also includes providing relief from the symptoms or side-effects of the disease (including palliative treatment).

[0416] The terms “significantly different than,” “statistically significant,” and similar phrases refer to comparisons between data or other measurements, wherein the differences between two compared individuals or groups are evidently or reasonably different to the trained observer, or statistically significant (if the phrase includes the term “statistically” or if there is some indication of statistical test, such as a p-value, or if the data, when analyzed, produce a statistical difference by standard statistical tests known in the art).

[0417] Effective amounts, toxicity, and therapeutic efficacy can be determined by standard pharmaceutical procedures in cell cultures or experimental animals, e.g., for determining the LD50 (the dose lethal to 50% of the population) and the ED50 (the dose therapeutically effective in 50% of the population). The dosage or effective amount can vary depending upon the dosage form employed, the route of administration utilized, and whether it is used alone or in combination. The effective amount for any particular application can also vary depending on such factors as the disease being treated, the particular compound being administered, the size of the subject, or the severity of the disease or condition. One of ordinary skill in the art can empirically determine the effective amount of a particular molecule of the invention without necessitating undue experimentation. The dose ratio between toxic and therapeutic effects is the therapeutic index and can be expressed as the ratio LD50/ED50. Compositions and methods that exhibit large therapeutic indices are preferred. A therapeutically effective dose or effective amount can be estimated initially from cell culture assays. Also, a dose can be formulated in animal models to achieve a circulating plasma concentration range that includes the 1C50 (i.e., the concentration of the active ingredient, which achieves a half-maximal inhibition of symptoms) as determined in cell culture, or in an appropriate animal model. Levels in plasma can be measured, for example, by high performance liquid chromatography. The effects of any particular dosage can be monitored by a suitable bioassay, such as a bioassay known to one of ordinary skill in the art. The dosage can be determined by a physician and adjusted, as necessary, to suit observed effects of the treatment. Combined with the teachings provided herein, by choosing among the various active compounds and weighing factors such as potency, relative bioavailability, patient body weight, severity of adverse side-effects and preferred mode of administration, an effective prophylactic or therapeutic treatment regimen can be planned which does not cause substantial toxicity and yet is entirely effective to treat the particular subject.

[0418] As used herein, “ameliorates symptoms and/or defects” is improving any defect or symptom associated with a disease or disorder related to an abnormality in splice modulation, such as the diseases or disorders disclosed in Table 1. As compared with an equivalent untreated control, such reduction is by at least 5%, 10%, 20%, 40%, 50%, 60%, 80%, 90%, 95%, 99% or more as measured by any standard technique.

[0419] In another aspect, the present invention is directed to a kit including one or more of the components of a SNA previously discussed. A “kit,” as used herein, typically defines a package or an assembly including one or more of the compositions of the invention, and/or other compositions associated with the invention, for example, as previously described. Each of the compositions of the kit, if present, may be provided in liquid form (e.g., in solution), or in solid form (e.g., a dried powder). In certain cases, some of the compositions may be constitutable or otherwise processable (e.g., to an active form), for example, by the addition of a suitable solvent or other species, which may or may not be provided with the kit. Examples of other compositions that may be associated with the invention include, but are not limited to, solvents, surfactants, diluents, salts, buffers, emulsifiers, chelating agents, fillers, antioxidants, binding agents, bulking agents, preservatives, drying agents, antimicrobials, needles, syringes, packaging materials, tubes, bottles, flasks, beakers, dishes, frits, filters, rings, clamps, wraps, patches, containers, tapes, adhesives, and the like, for example, for using, administering, modifying, assembling, storing, packaging, preparing, mixing, diluting, and/or preserving the compositions components for a particular use, for example, to a sample and/or a subject.

[0420] In some embodiments, a kit associated with the invention includes one or more lipid cores. A kit can also include one or more oligonucleotides. A kit can also include one or more anchors or molecular species and/or linkers or linker moieties.

[0421] A kit of the invention may, in some cases, include instructions in any form that are provided in connection with the compositions of the invention in such a manner that one of ordinary skill in the art would recognize that the instructions are to be associated with the compositions of the invention. For instance, the instructions may include instructions for the use, modification, mixing, diluting, preserving, administering, assembly, storage, packaging, and/or preparation of the compositions and/or other compositions associated with the kit. In some cases, the instructions may also include instructions for the use of the compositions, for example, for a particular use, e.g., to a sample. The instructions may be provided in any form recognizable by one of ordinary skill in the art as a suitable vehicle for containing such instructions, for example, written or published, verbal, audible (e.g., telephonic), digital, optical, visual (e.g., videotape, DVD, etc.) or electronic communications (including Internet or web-based communications), provided in any manner.

[0422] In some embodiments, the present invention is directed to methods of promoting one or more embodiments of the invention as discussed herein. As used herein, “promoting” includes all methods of doing business including, but not limited to, methods of selling, advertising, assigning, licensing, contracting, instructing, educating, researching, importing, exporting, negotiating, financing, loaning, trading, vending, reselling, distributing, repairing, replacing, insuring, suing, patenting, or the like that are associated with the systems, devices, apparatuses, articles, methods, compositions, kits, etc. of the invention as discussed herein. Methods of promotion can be performed by any party including, but not limited to, personal parties, businesses (public or private), partnerships, corporations, trusts, contractual or sub-contractual agencies, educational institutions such as colleges and universities, research institutions, hospitals or other clinical institutions, governmental agencies, etc. Promotional activities may include communications of any form (e.g., written, oral, and/or electronic communications, such as, but not limited to, e-mail, telephonic. Internet, Web-based, etc.) that are clearly associated with the invention.

[0423] In one set of embodiments, the method of promotion may involve one or more instructions. As used herein. “instructions” can define a component of instructional utility (e.g., directions, guides, warnings, labels, notes, FAQs or “frequently asked questions,” etc.), and typically involve written instructions on or associated with the invention and/or with the packaging of the invention. Instructions can also include instructional communications in any form (e.g., oral, electronic, audible, digital, optical, visual, etc.), provided in any manner such that a user will clearly recognize that the instructions are to be associated with the invention, e.g., as discussed herein.

[0424] All references, including patent documents, disclosed herein are incorporated by reference in their entirety.

[0425] According to some aspects, the SNA comprises a core and antisense oligonucleotides arranged in an oligonucleotide shell, wherein the oligonucleotides comprise a nucleotide backbone comprising a modification in one or more of the carbons in the five-carbon sugar, and wherein five nucleotides or fewer than five nucleotides do not comprise a modification in the five-carbon sugar. In some embodiments, four nucleotides or fewer than four nucleotides do not comprise a modification in the five-carbon sugar. In some embodiments, three nucleotides or fewer than three nucleotides do not comprise a modification in the five-carbon sugar. In some embodiments, two nucleotides or fewer than two nucleotides do not comprise a modification in the five-carbon sugar. In some embodiments, one nucleotide does not comprise a modification in the five-carbon sugar. As disclosed herein, a modification in the five-carbon sugar refers to the presence of at least one group, which is not a hydrogen (H) or a hydroxyl (OH) group at the 2′ position of the five-carbon sugar. In some embodiments, a modification in the five-carbon sugar refers to any of the modifications to the five-carbon sugar disclosed herein. In some embodiments, the five carbon sugar does not include a H and/or OH at the 2′-position of the five-carbon sugar.

[0426] In some embodiments, all of the nucleotides in the nucleotide backbone of the antisense oligonucleotides comprise a modification in one or more of the carbons in the five-carbon sugar.

[0427] In some embodiments, the modification is at the 2′-carbon of the five-carbon sugar. In some embodiments, the modification is a 2′-O-methylated nucleotide. In some embodiments, the antisense oligonucleotide comprises the nucleic acid sequence CCCACAGGGGCATGUAGU (SEQ ID NO: 58). In some embodiments, the antisense oligonucleotide comprises or consists of the nucleic acid sequence mCmCmCmAmCmAmGmG*mG*mG*mC*mA*mT*mGmUmAmGmU (SEQ ID NO: 59), wherein * is a phosphorothioate linkage and m is a 2′-O-methylated nucleotide. In some embodiments, the antisense oligonucleotide comprises the nucleic acid sequence mCmCmCmAmCmAmGmG*mG*mG*mC*mA*mT*mGmUmAmGmU/Spacer18/Spacer18/3 CholTEG (SEQ ID NO: 211), wherein * is a phosphorothioate linkage, m is a 2′-O-methylated nucleotide, Spacer18 is a hexa(ethylene glycol) spacer, and 3CholTEG is tri(ethylene glycol) bound to a cholesterol.

[0428] According to some aspects, the SNA comprises an antisense oligonucleotide comprised of 8 to 50 linked nucleosides in length targeted to a regulatory site of a pre-mRNA of interest and a linker comprising a molecular species at the 3′-end or the 5′-end of the antisense oligonucleotide, wherein the molecular species is a hydrophobic group comprising a stearyl.

[0429] In some embodiments, the stearyl is a distearyl.

[0430] The genomic nucleic acid sequence, pre-mRNA nucleic acid sequence, mRNA nucleic acid sequence and amino acid sequence of SMN2, for instance, which is a target related to a disease or disorder associated with an abnormality in spice modulation, are well known to one of ordinary skill in the art. Non-limiting examples include:

Homo sapiens genomic SMN2 nucleic acid sequence
NCBI Ref. Seq.: NG_008728.1
(SEQ ID NO: 12)
CCACAAATGT GGGAGGGCGA TAACCACTCG TAGAAAGCGT GAGAAGTTAC TACAAGCGGT
CCTCCCGGCC ACCGTACTGT TCCGCTCCCA GAAGCCCCGG GCGGCGGAAG TCGTCACTCT
TAAGAAGGGA CGGGGCCCCA CGCTGCGCAC CCGCGGGTTT GCTATGGCGA TGAGCAGCGG
CGGCAGTGGT GGCGGCGTCC CGGAGCAGGA GGATTCCGTG CTGTTCCGGC GCGGCACAGG
CCAGGTGAGG TCGCAGCCAG TGCAGTCTCC CTATTAGCGC TCTCAGCACC CTTCTTCCGG
CCCAACTCTC CTTCCGCAGC CTCGGGACAG CATCAAGTCG ATCCGCTCAC TGGAGTTGTG
GTCCGCGTTT TTCTACGTCT TTTCCCACTC CGTTCCCTGC GAACCACATC CGCAAGCTCC
TTCCTCGAGC AGTTTGGGCT CCTTGATAGC GTTGAGTGGA GGCCCTGCCG CGACTTGGCA
GTAGCTTATT TTGTTCACTC CTCTCTGGCT GGTGTGGGGG AGGTGGGGGC ATTAGGCCAG
GGTGAAGCAG GGGAACCACT TAGGAGTCTG TTAAGATGAT CTGAACTTCA GAACAAGATG
TTATTAACAG AGTGAAAGTA TTTGGATTCT GGGTATATTT TGAAATCGGA GGCAACAGGT
TTTTCAGATA GATTCGATAA CGGAGGTTAT CCTGAATAGT TGAAAAGATA AAGTTGCCTT
TTGCTGAGGT GGGAAAGAGA AGATTGCCAG TAGAGCAGGT TTCTCAGGAG TTCAGTCTTG
GGCATAGCAT GGTAGGGGTG AATTTGGCTG GAGTGAGTTG GAGAGTAGGA GAAGAGAAAT
CCAAGGCAAC ATTTGACCAG CCTGGGCAAC ATAGTGTGAC TCCGAGTCTG CAAAAATTAG
ACGGGTGTTG TGGTGCGCGT CTGTGGTCTC AGCTACCTGG AAGGTTCAGG CCTTGGAAGG
CTCAGGGAGG TGGAGGCTGC AGTGATCTGT GATTGCGCCT CTGCACTCCA GCCTGGGCGA
CAGAGCCAGA CCCTGTCTTA AAACAAAATA AACGGCCGGG CGCGGTGGCT CAAGCCTGTA
ATCCCAGCAC TTTGGGAGGC CGAGGCGGCC GGATGACAAG GTCAGGAGAT CGAGACCATC
CTGGCTAACA CGGTGAAACC CCGTCTCTAC TACAAATACA AAAAATTAGC CGGGCGTGGT
GACGGGCGCC TGTAGTCCCA GCTACTCGGG AGGCTGAGGC AGGAGAATGT CATGAAGCCG
GGAGGCGGAG CTTGCAGTGA GCCGAGATCG CGCCACTGCA CTCCAGCCTG GGCGATAGAG
CAAGACTCCG TCTCAAATAA ATAAATAAAT AAATAAATAA ATAATAAAAA CATCGGTAGG
CATATTTCAA GGAATTCTAT TTAAAAAAAA TTTTTTTAGA GACAAGTTCG CTCTCTGTGG
CCCAGGCTGG AGTACAGTGG CATGATCCTA GCCCATGGCA GCGTTGATCT CTTGGCCTCA
AGCGACCCTC CTTTGGAGTC GCTGGGCCTA AAGGAGTGAG CCACCACGAA ATTTTATTAT
AAATGGAGGG TAGAGAAATT GGGCAATAAA TGGAGGGGGA AGTGAGTTAA GAGGAATTTT
AATTATGTGT GTGTGGTTTT AAAAGAGGGG GGTCTTGCTC TGTTGCCCAG GCTGCTGGGG
TGCCAGTGGC GCAATCATGA ATCACTACAG CCTTGGACTC CTGGCCTCAA GCTATCCTCC
CACCTCTGCC TCCCAAAGTA CTGGGATTAC TAGTGTGAGC CACTGCACTA AGATAGGAGC
AACATGTTTC AGCATGTTTG TGGGTTGATA GGAAAGATGA GAATGGGAAA GTTGATGTCG
GAAAGAAGAC AATGGCTAGA GCAATGTCCT AGAGTAGGTA AGAAGGGATG GATTTGGCCT
TTGTTGGAAA CATTAGCGGT TCTTTTGGTG ACAGCTATAT AGTTAACACA TCTATGATAC
GTGAATGGGC AGATAGGATG GCAGGAGATT TTGAAAGTTC TCTTGATTCT TACTGTTCTC
TTAGTGAAAG AAGCAAGGTT ATCAGCTAGA AGCTGGGATG GGAGAGGAAA GAGAAGATGG
GAAGTAGATA GTTCTTTAGA AGAGTGGGCA AGGGTlGGAC TAGGGAAGTT TAGTGGAAAT
ATTGCTAGGC AACATAAAGA GCCTACTTGA GATTCGTGGT CATGAGTTGA AGGAGACCAG
ACAGCAAGAT TGTGTATGAG GGCACCCACA GAGTAAATGG AGAGTTGAAA TTAATGCAGT
TGTGATTTTA CCACGTGGAT ATGAAGAAGT GAGGGGGAGA AGTACAAAGG AGTTCTCTTA
ATGATTGACC ATGGAATTTA AGCTGGCTAA GAAAGGAAGT GAGAGGCCGG GCGCGGTGGC
TCACGCCTGT AATCCCAGCA CTTTGGGAGA CTGAGGTGGG TGGATTACCT GAGGTCAGGA
GTTTGAGACC AACCTGGCCG ATATGGCGAA ACCCCATCTC TAATAAAAAT ACAGAAAAAT
TAGCCGGGAA TGGTGGCAGG TGCCTGTAAT CCCAGCTACT CAAGAGGCTG TGGCAGGAGT
ATCCCTTGGA CCCAGGAGGT GGAGGTTGCA GTGAGCCGAG ATCACGCCAC TGTACTCCAG
CCTGGACGAT ATAGTGAGAC TTCACCTCAA AAAAAAAAAA AAAGAAAGGA AGTGAGGATT
TTAAGACCCT GAGAGACAGT TTAAAAAGTG GGAGGATCGG CCGGGCGCTG TGGCTGACAC
CTGTAATCCC AGCACTTTGG GAGGCCGAGT TGGGCAGATC ACAAGGTCAG GAGTTCGAGA
CCAGCCTGGC CAATATGGTG AAACCTTGTC TCTACTAAAA ATACAAAAAT TAGCCGGGCA
TGGTGTCACG TGTCTATAAT CCCAGCTACT CGGGAGGCTG AGGCAGAAAA ATTGCTTGAA
CCTGGGAGGC AGAGGTTGCA GACAGCTGAG ATCACTCCAT TGCACTCCAG CCTGGGCAAC
AAGAGCAAAA CTTTGTCTTT AAAAAAAAAA AAAAAAAAAG AATACAAAAA TTAGCCGGGC
GTGGTGGCGC GTGCCTATAA TCCCAGCTAC TTGGGAGGCT GAGGCAGGAG AATCAGTTGA
ACACGGGAGG CGAGGTTTGC AGTGAGCCGA GATTGCGCCA CTGCACTCCA GCCTGGGCGA
CAGAGCAGGA CTCCTCTTGG AAAAAAAAAA TTAGCTGGGC ATGGTGGCAG GTGCCTGTAG
TCTCAGCTAC TAGGGAGGCT GAGGCAGGAA AATCACTTGA ACCCGGGATG TGGAGTTTGC
AGTGACCCGA GATCGTGCCA CTGTACTCCA TCCTGGGCGA CAAAATGAGA CTCTGCCTCA
AAAAAAAAAA AAAAAAAAAG TGGGAGGATC AATGTACTGC CAGTCCTAAT GAAGTGGAAT
GATTGTCCCC ATCAAATCAC TAGTAGGAGT AAGTTGCAGA GCCTAGAAGG TGATGGTTAA
GAGAGTGGGA TTCTTGAAAC TGCATTTATG GAGAGGTTGT GGTTATTGGT TATAATAAAT
AAATACAGTT GAAGTGAGTG AGTAGCTGAG ATTTGGGGAT GTATCAGTTC ATTCTTACAC
TGCTACAAAG ACATACCTGA GACCAGGTAT TTATAAAGAT AAGAGGTTTA ATCAGCTCAC
AGTTCTGCTG CCTGTACAGG CTTCTCTTGT GGAGGCCTAA GGAAACTTAC AGTCATGGTG
GAAGGTGAAG GGGAAACAAG CACAGTCTTC ACATGGCCAG CAGGAGAGAG AGAGAAGGGG
GAAGTGCTAC ATACTTTAAA ACAACCAGAT CTTGTGAGAA CGCTTATCAG GAAACAGCAC
TTGGGGATGG TGCTAAATCA TTAGAAATCA CCCCCATGAT CCAGTCGCCT CCTACCATGC
CCACCTCCAA CACTGGGGAT CACAATTCAG CATGAGATTT GGGTAGGAAC ACAGAGCTGC
ACCACATCAG AGGATGTACA AGATTGTGGT GGAGAGGAGT TTAGAGACCT GCAAATATAG
GGTAATTGAA GGGATCATCT ACATGGATAT TTAAATCACC AAAAATTATG ACAGGAGTAG
TGTTGGAGAG AGAACTGCGA TGTAAACATT AAGGAATGAG GAAGAGTGAC TCGGTAGGCT
GTAGGTGACT GCAATAGGAA ACGATAATAG ACTGTGAGTC TGGTGACAAG ATTTTCCTTC
TTTCTTTTTT TCCCCCCCCC CGAGACAGGG CCTCTTTTTG TTGCCCAGGT GGGAGTGCAG
TGGCGCGATC ACGGCTCACT ACAACCTCCT CCCAAGCTCA AGGGATTCTC CCACTTCAGC
CTCTCAAGTA GCTGGAACTA CAGGTGCTGA CCACCATGCC TGGCTACTTT TTGTCAGGAT
TTTCAAGGCT GGGAATTTTG AGAGGGGAAT GGAGGAGAAT AATCTGAAAG TGCAAGTAAG
GAGCAGGGAA GATTTCTTTT TTCTTTTTTT TTTTTTTTTT TGAGTCGGAG TCTGGCTCAG
TCGCCCAGGC TGGAGTGCAG TGGCGAGATC TCCGCTCACT GCAAGCTCCG CCTCCCGTGT
TCACGCCATT CTCCTCCTTC AGCCTCCCGA GTAGCTGGGA CTACAGGCGC CCGCCACCAC
GCCCAGCTAA TTGTTTTTTT GTATTTTTAG TAGAGACGGG GTTTCACCGT GTTAGCCAGG
ATGGTCTCAA TCTCCTGACT TTGTGATCCG CCCACCCCGG CCTCCCAAAG CGCTTGGGAT
TACAGGCGTG AGCCACCGCG CCAGCCAGAG CAGGGAAGAT TTCTTCCCCA CATCTCCAGT
AGGTACAGTG ATATGAAGTG TGTGGAGGAG AAAAGAGGAA ACATCTATCA TTTGAGATGG
CTGCGAAAGG AAAAGGCATC CTCAGGGAGC TAGATTTTAC TTAGAGCAAG AAATGAAGGG
ATGATTCAGA GGTTAAAAGA GTGGATTTTA TGAATTACTC AAGGGAGCAC AGTGGAAGTT
TCAGGAAGTG GTAGGAGAAG GTAGAAGATG GCAGGGTGTT GGGAATAATT TGAGAAATCT
GAGCTACTGG AAATGACTGA GAATCAGATA TAAAGGCAGT CCTGGTGGTC CGTTCTGGCT
GCCGTTGCTG TGTAACGAAT CTGCCAAAAC TTAGTGGCTT GAAACAACAA AGAACATTTT
ATTATCTCTC ATTGTTTCTG TGGGTTAGGA ATTTGTGAGA GCCGTGCTGG GCAGTTTTCG
TGCGGCTGTC TCGTGGTTGC ACCTACATAG TTGCTAGAGC TACAGTAGCT GGGGACTGAG
CAGCTAGGGA TTGGCAGGCT ATCTCTTTTT TTCATGTAGT CTCATGAAGA TTTCTTTATG
TGGTTTCAAT GTGTGGGCTG GTTTGGATTT CCTTATAGCA TGGTGGCCTC AGTTGGATTG
CTGTTTTGTG ATCCTTTTCA TCCCTCCTTG TCCTGTCCCC AGACAACCAC TGATCTACTT
TCTGTCACCA TAGATTAGCC TGCATTTTTA AGAATTTTTA TAAACGTGGA ATGATAGAGT
ACCTTTTTTG TCACGTTTCT TTTATTTATC ATAGCTATTT TGATTTTCAT CCATTTTATT
GCTGAGTAGT ATCCCATTGC ATGTATATAC TATACTGTAT TCATTCGCTT GCTTGTGAAC
ATTTGGGCTT TTTCCAGTTT GGGACTGTTA ACAAGTAGAG CCACTATGAA TATTAGTGTA
TAAGACTTCA TATAGCCAAG GCTGGCAGAT CGCTTGAGCC CAGGAGTTTG AGACCAGCCT
GGGAAACATG GTGAAACCTC TATTTTTATT TTAAAATCAA AAATTAAAAA TTTTCTATAA
AAAATTTTAA AGAAGACTTT GTATAGACAT ACGCTTTCAT TTTTCTTGAG TGAATACTTA
GGTCTCAGGG TAGATGTATT TTAAGTCTTT AAGGAGCTGT CAAACTCTTC CTCAAAGTGG
TGGTTGTACC ATGTTACTTT TTAATATAAC AGAGATTAAT TGAGCAAAGA AAAATTCAAA
AGTTGGACAG CCCCCACAAC TAAATAGGTT CAGAACAGCT CCCCCATTTT GCATTTTGAC
CAGCAATGTA TGAAAGTTCC ATTTGCTCAG TGTCCCTGCA AACACCTGGT ATGGTCAGTC
TTTTTAATTT TAGGCATTAT AATAGATATA GTGGCTTCTT GTGATTTTAA TTAGCATTTC
CTAATGACCA GTGCTGCTGT TGATCATTTC ATGAGTGTAT TTGCCATCCG TATATCTTTT
TTGGTGAAGT GTCTATTCAA ATCATTTGGG TTTTTTTTTT TTTTGTTTTT TTTTTTTGGA
GACAGTGTCT CACTCTGTCA CCCAGGCTGT TGTGCAGTGG TGCAATCACA CAGCCTACTG
CAGCCTCCAC CTCCTGCGCT CAGTCTTCTT GTCTCAGCCT TCTGAGTAGC TGAAATTACG
AGCACACGCC ACAATGCCTG GCTAATTTTT TAAAATTTTG TAGAAACAAG GTCTCATTAT
GTTGCCTGGG CTTGTCGTGA ACTCCTGGGC TCAAGCAATC TTCCTGCCTC AGCCTCCCAA
AGATTGGGAT TGCAAGTATG AGCCACTGCA CCCGGCCAAC TTACCCATCT TTTAATTGAA
TTTTTTTGTT GTTGAGGTTT GAGAGTTCTT CATGTTTGCT GGGTACAATA TCTTTATCAG
ATAGGTAACT TGCATGTATT TTCTCCCGGT TTACACTTTG GTTTTTCATT TTGTTAACAA
CGTCTTTTTA AGAACAGAAA ATCTTAATTT TGCTGAAATC TAATTTTTCA GTTTTTTCTT
TGATGGTTTT GAGAGAGGAG GTAAAAAAAG ACTAGGTAAG CCGATAGTTA GACAGAGTCC
TCGGTAGAAC TTCCCTTCTA ACAAAAAGCA GCCCAAGAAA TCACTTCTCT TCTAACAAGG
AGCAGCCTGG AAGATCGGGC TGTAAACATG TATAAGGAAG CAGCTCTGGC ACAGAGuGGG
AGCTTCCTGG GTAATCAGCA AGCTTCACAT ACGTAAGGTG GGTATGTGAA GTAAACACAG
TATGTGAAGT AAACACAGTG GACCTTAGTA CATACTCAGA TAAGGAAGCT GGAAGCTTGC
ATGTTGTGAG TTGTTGGGGT TGCCTGCAGC TGCACGGAGA GAAAGGGGTA CCTGGGGCCA
GGCATGTCCA CCATGGTGGC TCCACCTCCC CTTATTTAGC ACATGCACAA TAGGAAAGAG
ATAAGCAATG TGGAGTAGCT CAGGCCAAGG ACCTGCCTGC ATAATAAAAG GTTGGGGTGG
GGGATGCCAG AGATTCACGC TCTGTGCAGA TGGCAACACC TGGTCCTAAC TGGTTTTTTG
CTCCCTATGT GTAGATAAGC TACCCCCTTC CCATTAGCTC ATTTATAAAA ATGCTTGCAT
TTCACTGTGG AATGGGAACT CTTTTCAGGA CCTCTCTCTG CAGGAGAGAG CTAGTCTCTT
TCTTTTGCCT ATTAAACTTC TGCTCTAGCC TCACACCCTT GGTGTGTCAG CGTCCTTGAT
TTCCTCAGCG TGAGACCAAG AACCTCGGGT GCCACCCCAG GCAACAAGGC CATTTCAGTT
TGTTCTTTTG TTATAGGCAA TCCATGATCA CAGATTTTTC TCTCTTTTTT TTTTTTACAC
AGTTTAGAGT TTTAGTTTTA CACTTAGGTC TGTAATCCAT TTTGTATTAA TTCTTATATG
TGGCTCAGTG TAGGTGGAAA TTTGGTTTGT TTTTGCATAA GGATTTCCAA TAGTTTTACC
ACCATTTCTT GAAACTACTA TGCTTTCTCT ATTAAACCAC ATTTGTAACT TTAGTTAAAA
TCAGTCACAT ATATCACAGG GCTATTTCTG ACTCTCAATT CTGTTACATT GTCTATTAGT
GTATATTGAT GTCAGTACTA CACTTTTAAT TACTATTGCT TCAGGGTATG TCTTGTAAAC
CAAAAATAAA ATTATAGGCC CCCCCCGCCC CTGCACAACC AACTGAATGG ACCCATCCTC
TCAGCCAAGG GCATTCCAAA ATTAACCTGA AAAACTAGTT CAAGCCATGA TGGGAAGGGG
GAGTTGGACA TGTCTCATCA CACCCTACTA CCTTTTGGAA TTACTGATAG AACAGACTCT
TAAAGTCTGA AAAGAAACAT TTACAACCTA CCCTCTCTGA AGCCTGCTAC CTGGGAGCTT
CATCTGCATG ATAAAACCTT GGTCTCCACA ACCCCTTATG GTAACCCAAA CATTCCTTTC
TGTTGATAAT AACTCTTTCA ACTAGTTGCC AATTAGAAAA TCTTTAAATC TTCCTATGAC
CTAGAAACCT CCCTACCCCC ACTTTGAGTT GTCCTGCCTT TCCTGACAGA ACTCATGTAC
ATCTTACATA TATTGATTGA TGCCTCATGT CTCCCTAAAA TGTATAAAAC AAAGCTGTAC
CCCACCACCT TGGGGACATG TCATCAGGAC CTCCTGTGGC TGTGTCATAG GAGCGTCTTT
AACTTTGGCA AAATAAACTT TCTAAATTGA TTGAAACCTG TCTTAGCTAC TTCTGGTTTA
CAGTCTTAAA GTTAGATAAT GTAAATTGTC CAGCTTTGGT TTATTTTTGT CCTTAGTAGT
TCCATATAAA TTTTAGAATC AGCTTTTCAA TTTAATACAC TACTTTCCTC TTAGATCCAC
AATTAAATAT ATTTGATGCT AACAATTCTG TTTTATGTTT TTCGTTTTTT TTTTTTGAGA
CAAGAGTTTC GCTCTTGTTG CCCAGGCTGG AGTGCAGTGG CGCGATCTTG GCTCACCACA
ACCTCCACCT CCCAGGTTCA AGCAATTCTT CTGCCTCAGC CTCCCGAGIA GCTGGGATTA
CAGGCATGCG CCACCACGCC CGGCTAATTT TGTATTTTTA GTAGAGACGG GGTTTCACCA
TGTTGATCAG GCTGGTCTTG AACTCCTGAC CTCAGGTGAT CCACCCACCT CGGCCTCCCA
AAGTGTTGGG ATTACAGGCG TGAACCACCA TGCCTGGCCA GTTCTGTTAT TTTTAAAACC
CAAGTTTCCC TGGTCATATC TTGGTTGGAT GAAGCGTATT TTCAATAGAT TACCCTGGAA
AGGCTAGTGA GTACGGTATT CTTCTACATT TTAGACTTTT CTTAGTCTTG CTACTTCAAG
GACAGCTAGG CTGCATATAA AATTCTTGGC TCATACTTTT TCCCCATAAA TTTCTATGAG
AAAGTCTAAT GATAACTGAT TTTCTTTATT TTGTAACTTA GTCTTTTTGC TTAGAGGCTC
TCTGAGGATG GGAGGGGGTT CTTCCTCCCA TCCCTAGGAA TTTTTCTTTT TTTTAAATTC
CTAATCACTA GACCACCAGG AAGATTGTTT GTTTTGTTTT GTTTTTATTC TTCAGGGACC
CCATTTATAC ATACGTTAAA TAAATACTGT TTGCCAATGT ATCAACCATT TTGCTTCTTA
TTTATTTTTG TTCCTTTGGT TCTTTTTCAT GGCTTTGCTT TGGTGCTCCT TAGATTTTCA
GTCAGATGTA TTTGTCCTTG GGTACCTTGT AATCAGTATT ACCTTTTCTT CTGTCGCTTT
GTTTTCTGTT CGTTTTGAAA TTACTTGTTT CCTGGTCTGG CAATAACAGT TGAGATATGA
GGAGTTTGAG CTGCCATCTG TCTATGTATC TTGCTTTAAG ACTGCACTCT TCTATTGATA
TCACTGGCCT TGATTTTGTG ATTTCTTTAT TTCTTCAGGA CCACCCTTCA TTTTCTACTG
TTTGCTTCCT TTTTTTTTGA GATGGAGTCT CACTCTGTCA CTCAGGCTGG AGTGCAGTGA
TCTTGGCTCA TTGCAACCTC TGCCTCCCGG GTTCCAGCAA TTCTCCTGCC TCAGCCTCCC
AAGTATCTGG GACTACAGGT GTGCACCACC ATGCCCGGCT AAGTTTTGTA TTITIAATAG
AGACGGGGTT TTGCCACATT GGCAGGCTGG TCTCAAACTC CTGATGTCAA GTGATCCACC
CACCCCACCC ACCTCTGCAT CCCAAAGTGC TGGGATTACA GGAATGAGCT GCCGTGCCCA
GCCTCCCCCC TACCCCCCTT TTTTTCTTTC GAGACAGAGA TTATAGGTGT GAGCCACTGG
ACCCAGCCTG TTTTTATTCC TTTTACCAAA TCTCCAAGGA ATATCTTCCC TTCCAAGTGC
GAATGTAACC TTAAGTCAGI TAACCTCTTT GTGATTACTT TTCTTATCTG CAAAGTGACT
TAATGATCTT AAGTACTTTT TTTTTTTGAG ACAGGGTCTC ACTGTCACCC TGGCTGGAGT
GCAGTGGCAC GATCTCTGAT CTCCACTCAC TGCAATCTCC TCTTCCCTGG TTCAAGCGGC
CCTCCCACCT TAGCCTTCTG GGTAGCTGGG ACTACAGATG TGAACCACCA CGCCGAGCTA
ATTTTTGTAC TTTTTGTAGA GATGGGGTTT TGCCATGTTG CCCAGGCTGG GATTATTAAG
TACTTTTTAT CATACAGCAA GATTGACATT TTATATTGGA ATACATTTGT CTCTATATAA
CGGAGATTAA CAGGAAAATG ACAAGCCTGG GTGCGGTGGA TCATGCCTGT AATCCCAGCA
CTTTGGGAGG CTGAGGTGGG AGGATCACTT GAGGTCAGGA GTTCGAGACC AGTTTTGCCA
AGATGATGAA AGCCCATGTC TACTAAAAAT ACAAAAATTA GCCCAGCTTG ATGGTGGGCG
CCTATAATCC CAGCTATTTG AGAGACTGAG GCAGGAGAAT CACTTGAACC TGGGCAGCAG
AGGTTGCAGT GAGCCGAGAT CATGCCACTG CACTCCAGCC TGGGTGGCAT AGCGAGACTC
TTGTCTCAAG AGAAAACAAA AGAAAACAAA AAAAAAACAG GAAAATGACA AAAAGTAATA
TTACAACTCA GTGAATTTTA TAACAAACTT TTTTGGAATT CATTGACTAA TACTATACCA
AATCCAAAAT ACTCTCTAGT ATACCAAATC CAACTCTACC CTATAGTATA AATTGGATTC
TATTTGGACT TGTCTCACTA ATCCCTCATA CAGTGTGTTT TATTTTTTAT TGAAGTAAAA
AAATTTGTCA TTTTAACCAT TTTTAAGTAT ATAGTTCAGT AATATTAAGT ATGTTCATGT
TGTTGCGCAA TAGATCTTCG GAAGTTTTTC GTCTTGCAAC CTGAAACTCT ACCCATTAGC
AAATTCCCAT TTCTCCTTAC ACTTAGCCCT TGGTAATCAT CATTCTTTTT TTTTTTTTTT
TGAGATGGAG TTTTACTCTT GTTGCCCAGG CTGGAGTGCA ATGGTGCAAT CTCGACTCAC
CACAACCTCC GCCTCCCAGG TTCAAGCAAT TCTACCTCAG CCTCCCGAGT AGCTGGGATT
ACAGTCATGC ACCACCACGC CCGGCTAATT TTGTATTTTT AGTAGAGAAG GGGTTTCTCC
ATGTTGAGGC TGGTCTCGAA CTCCTGACCT CAGGTGATCT GCCCACCTCG GCCTCCCAAA
GTGCTGGGAT TACAGGCGTG AGCCACTGCG CCTGGCCCAT TCTTTCTAAT TCTATAAATT
TGACTACTTA GTTACCTTAC ATAAATAAAT TCTTATAGTT AGTGTTATTT TTGCTTCCAT
GCCTTTTTTG TTGTTGTTCA TGCTCTTACT TGGAATGCGT TCTATTTTGT CTACCTATGC
ACATCCTGTT GGGTTTTTTT TTTTTTTGGG GGTTTTTTTT GTTTTTTTTT GTTTTTTTTT
CCCAGACAAG GTCTCAATTT GTTACCCAGG CTGGAGTGCA GCGGCGCCAT CTCCACTCAC
TGCATCCTCA ACTTCCTGGG CCCAGGTGAT CCTCTCGCCT CAGCCCCTGC AGGTAGCTGG
GACTATAGGC ATGTGCCACC ATGCCCAGCT AAATTTGGTT TTTTTGTTTG TTTGTTTTTG
AGACAGAGTC TCACTCTGTC ACCCAGGCTG GAGTGCAGTG GCACAATCTC AGCTCACTGC
AATCTCTGCC GCCCGGGTTC AAGTGATTCT CCTGCCTCAG CCTCCCAAGC AGCTGGGATT
ACAGGTGACT GCCACCACGC CAGCTAAGTT TTGTAGTTTT AGTAGAGATG GGGTTTCACC
TTGTTGGCCA TGCTGGTCTC GAACTCCTGA CCTCGTGATC TGCCTGCTTC TGCCTCCCAA
AGTGCTGGAA TTACAGGCAT GAGCCACCAC GCCCGGCCAG AATTTTTGTA TTTTTAGTAG
ACACAAGGTT CTTACCCTGT TGCCTAGGCT GGTCTAGGAG TCCTGGACTC AAGCAATTCA
CCTGCCTTGG CCTCCCAAAA TGCTGGGATT ACAAGCCACC ATGCCCGGCC TAAATCCTGT
TGTTTTGTTT TGTTTTATTT TGTTTTGTTT TGTTTTGTTT GTTTTTTGAG ACAGAGTCTC
GCTATGTCTC TCAGGCTGTA GTGCAGTGGC GCGATCTTGG CTCACTGCCA CCTCTGCCTC
CCAGGTTCAA GTGATTCTCC TGCCTCAGCC TCCCAAGTAG CTGGGATTAC AGGCATGTGC
TACTATGTCC GGCTAATTTT TGTATTTTTA GTAGAGACAG GGTTTCACCA TGTTGGCCAG
GCTGGTCTCG AACTCCTGAC CTCGTGATCC ACCCACCTCG GCCACCCAAA GTGCTGGGAT
TACAGGCGTG AGTGGTTTTT ATTTCTTAGG CCGGTTTCCT CCATATGATC TTGCAGTAGA
CATTAATTTC TTTCCTTTTT AATTAAAATA CTGTTTGTAT TTCACATTTT GATGTTTGTT
AAGATTTGTT TTATATTGTT TTTTGTTTTG TCTTGTGTGA TAGTCTTAAA TCCCTAGTTA
GATAATAACT GGAGAGTACC ATGTTTCTAT ATATCTCTCA GTGACTTGCA CAGTGCTAGC
AGATAGTGCT AAAAAATTAT TTATTATTAT TATTATTTTG TTATTGTTGT TGTTGTTGTT
AGACAGGGTC TTCCTCTGTC ACCCAGGCTA GAGGGCAATG GGATGATCAT AGCTTACTGC
AGCCTCCAAC AACTGGGCTC ATGTAATTCT CCTGCCTCAG CTTCCCAAGT AGCTGGGATT
ACAGGCATGA GCCACCATGT CTGGACAAAA ATATTTCCAG GTGCAGTGGC TCATGCCTGT
AATTCCCACA CTTGGGAGGC CGAGCGAGGC TGGAGGATCA CTTGAGCCTA GGAGTTCAAG
ACCAGCTTGG CTAAGATGGC GAGACCCCGT CCCTACAAAA AATTTTAAAA ACTAGCCAGG
CATGGTGGCA TGCACCTATA TTCCCAACTA CTCAGTGGGC TGAGGTGGGA GGGTCATTTG
AACACAGGAA TTTGAGGGGA GAAAAAAAGA AGAAAGAAAG AGAAGTGAAG GAAGGAAGAA
AGGAAGGAGG GAGGGAGAGA AGAAAGAAAC GAAAGAAAGG AAAAGAAAAG GAAGGAAAGA
AAATTGGTAC CAGGAAAGCA GGAAAGGGAA ATGGAAGTAA AAAAATAATA ATAATAATAA
AATGAAAATT GGTTAGTCAC TATTAACAAT TTGTATCCTT ATAATCTGGA AACATTATAA
TTTCAAAAGA AAAAATATTC TTTGGATCAT AGGTTCTGAG GTCAGAACAG CATTCCCGTA
GTCTAGATGA AGTCAAGTTT TATCTGATCT TAATTGAAAT AAATATAGCT GGCCTTGAAC
AAATCTACTC ATGGTATGTG GATAGGAATT AAATTGTAGG GGCATTCACT TGATGGCATT
CATTCTTAGA ACATTTACCT ATGTCTAGCT TTTGGAGTAA AGTCACATAA CCTCTAACCA
GGTAAGTTTC CTGTGGCTTT ATTTAGGATT TTAAATACTC ATTTTCAGTG TAATTTTGTT
ATGTGTGGAT TAAGATGACT CTTGGTACTA ACATACATTT TCTGATTAAA CCTATCTGAA
CATGAGTTGT TTTTATTTCT TACCCTTTCC AGAGCGATGA TTCTGACATT TGGGATGATA
CAGCACTGAT AAAAGCATAT GATAAAGCTG TGGCTTCATT TAAGGTATGA AATGCTTGCT
TAGTCGTTTT CTTATTTTCT CGTTATTCAT TTGGAAAGGA ATTGATAACA TACGATAAAG
TGTTAAAGTA CATGTTATTC AGTTTTCATT TTGAAGATTA GATGGTAGTA TGAGTTAGTT
AAATCAGGTG ATATCCTCCT TTAGAAGTTG ATAGCCTATA TATGTCATCC TTTGTGGAGG
CAATTTAAAT AAAATTTAAA ACATTTATTC CTGGCTGGGT ATGGTGGCTC ACTCCTGTAA
TCCCAGCACT TTGAGAGGCT GAGGCGGGTG GATCACCTGA GGTCAGGAGT TTGAGACCAG
CCTGGCCAAC ATGGTGAAAC CCCGTCTTTA CTAAAAATAC AAAAATTAGO CAAGCATGGT
GGCACGTGCC TGTAATCCCA GCTGCTTGGG ACACTGAGGC AGGAGAATTG CTTGAACCTG
GGGGGCAGAG GTTGCAATGA TTGCACCACT GCACTCCAGC CTGGGCGATA GAGTGAGACT
CCATCTCAGA AAACGAACAA ACAATGTATT CCTTTTAGTA TTTTTACATT GTATCAAACT
ATGGAAGTCC TCTAATTGAG ATTAATAAGA AAAAGACAAT CTGAATTATA ATTTTAAACA
TTTAACAAGC ATGTAGTAAA ATAATGATGA AGATAAATAG CATTAGTACA GCAATTAATA
TTTGTAGCAT GCTGACAGTG CTCTGTGTGC GTTTCATATA TTAAATTACT CTAATCATCC
CAAATCCTGT AAGTTGGGTA TCAATTCAAG TGTTCCTATT GGGTAGGAAT ATACAGTTCT
TTTAGGAAAT GTAGTATGGT TCTGTGTCTC AAACAGGACA CTTACACAGT TGGCCAACAT
CATCACCTTC TCCATTCTCT GAGATGTTTA GTCTTACTGA GCACTAAATA TGGGTCATCA
ATAGTCCAGA CTACCTTGAG CAAACAATAG TCCAGACTAC CTTGAGCAAA CAGAGCATAT
ACTCATACAG TGTATAAAGA GCACCAAGCA TACAGATTTC ATGTCTTTCT CATAGTTACT
CTTGTAACAT GAGCTAAAGA TCAGACCTCT ATGTCACCTT TGTAACTGAT TTCTAGATTT
TTTTTTTTTT TTGAGATGGG GTCTTGCCCT GTCACCCAGG CTGGAGTGTA GTGGCGTGAT
CATGCCTCAT TGGAGCCTTC AACTCATGAG CTCAAACAAT CCTCCTACCT CAGCTTCCTG
AGTAGTTGGG ACCACAGGTG TGTGCCACCA CACCCAGCTC ATTTTTGTAT TCTTTGTAGA
GATGCAGTCT CACCCTGTTG CCCAGGCTGG CCTGGAACTC CTGAGCTCAA AAGATCCCTC
CGCCTTGACC TTCCAAAGTG CTGGGATTAC AAGCATGAAC CACTGCACCC GGCCTAGATT
TTTAAATGTG CTTTCCAGTA TACACTGAAA CTAGAAGTCG ACTAAAGAAT TACCAAGAGA
ATTCTATAAA ATAGAGATTG AAATGGGGCT CGATGTGGGA TGGGTTGGTG ATATTGCAGG
GAGAAGTAAT CTGAGTAAAG GAGGAAAAGA ACTGATTTGG GAAAACGATA GTTTTAGTAG
TGAGTTTGAG TATGAATTAA GTTGAGATTG AATTTGAATT AAGTTGAGGT TGAATATGAA
TTAAGTTGAG GTTGAGTTTG AGGTATGAAT TAAGATGTGA AATTGATCAT TGGAAATGTT
AGATTGAGAA AAGTCACAGC TGGATTAATA GCTTCAGAAG TGTGTTTGCA GACAGTTGCA
ACTAAAGTAA TAAGAATAGA TGGCCTTGGC CGGGCGCGGT GGCTCACGCC TGTAATCCCA
GTACTTTGGG AGGCTGAGGC GAGCAAATCA CGAGGTCAGG AGTTCAAGAC CAGCCTGGCC
CACATGGTGA AACCCCGTCT TTATTAAAAA TACAAAAATT AGCTGTGCAC AGTGGTGCAC
GCCTGTAATC CCAGCTACTC GGGAGGCTGA GACAGGAGAA TCGCTTGAAC CTGGGAGGTG
GAGGTTGCAG TGAGCTGAGA TCAGTGTGAC TGCACTCCAG CCCGGTGACA GAGTGAGACT
CTGTGTAAAA AAATAAAATA AATAAAATAA TGGCCGTAAG CAAGTAAAGA AGGATGGCCA
GCTCTTATTG GGAATGCCTA AATCTAAGGC TTGATCAGAA GTAATGAAAC CGTTGGGGCC
CTACATTGCT ATGACATCCA AAGGGCCATG AATATCAGGA AGAAAGATAA TTAACAGGGT
CTAATGTTAC AGAGAGGTTG AGAGCAAGGA GATTTGATTA AAAGGGTCTT TAGAGCTGAT
GTCAGGTGTA TGATGCCTTT AAGAGCAGTT TTTATAGTGC AGGGGGTGGT CAAAAGAGAA
AATAGGTGCT TTCTGAGGTG ACGGAGCCTT GAGACTAGCT TATAGTAGTA ACTGGGTTAT
GTCGTGACTT TTATTCTGTG CACCACCCTG TAACATGTAC ATTTTTATTC CTATTTTCGT
AGCATGCTCT AAAGAATGGT GACATTTGTG AAACTTCGGG TAAACCAAAA ACCACACCTA
AAAGAAAACC TGCTAAGAAG AATAAAAGCC AAAAGAAGAA TACTGCAGCT TCCTTACAAC
AGGTTATTTT AAAATGTTGA GATTTAACTT CAAAGGATGT CTCATTAGTC CTTATTTAAT
AGTGTAAAAT GTCTTTAACT TAAGTGATTA GTACAGTGTT TCTATTGACA TATACTTATA
CAACTTCAAA AACAACTATT AAATTTTCTG TTATTTAGGA ACATGCATAT TAGTCATGAA
AGTATAAAGA ATTAGATGGG AATGATAAAT GCTAAAATCA GGACATGTGT TCCATTTGTG
AATGGAAGGC AGGGAGAAGG TGCCGTTTGG AAGGAGTACC CAAGAGCCGT AAGCTGAATT
GGCAGTGTTT TACATCTTAA GCTGAGAGAT AGATTTTTTT TTCCCCTTTT TCTTTAAAAA
CTCTAAAACT GTTAATTCCA AGGAACCCAG AAGTCTAGGT AGATTATTTC TGCTAGTTAA
AAGCAGTAGT CCTGAAAGCT GAATATTTTG GTGTCTTTTG AGCCAACTTT AGTTTCATCA
TTACCAAGGG GGAAGAGAGC TAACAGTTGA TGAGCACTTG CTCTAGGCCA GTCCAGAGTG
CTGGGCACCA TACGCATTTT ATCTCCCTCC CGCTATTCAC AACAAATATG GGAGGTAGTT
TATATTATAG CCATCTAATA AGATGGGGAA ACTAAGACTC AAAGAGATTC AGAAACTTGT
CCATGATTAT AAATGTAAGA GAGTTGGAAT TCAGATTTAT GTATTTAGAC CCCAAGCCTT
TCTCATTACA TCATTTTGCC TTCCAAATCT CTACCCTCTA TCCTTCACCT CCCCACTGAT
CAAAACGAGA TGATAGTTTG CCCTCTTCAA AAGAAATGTG TGCATGTATA TATCTTTGAT
TTCTTTTGTA GTGGAAAGTT GGGGACAAAT GTTCTGCCAT TTGGTCAGAA GACGGTTGCA
TTTACCCAGC TACCATTGCT TCAATTGATT TTAAGAGAGA AACCTGTGTT GTGGTTTACA
CTGGATATGG AAATAGAGAG GAGCAAAATC TGTCCGATCT ACTTTCCCCA ATCTGTGAAG
TAGCTAATAA TATAGAACAA AATGCTCAAG AGGTAAGGAT ACAAAAAAAA AAAAATTCAA
TTTCTGGAAG CAGAGACTAG ATGAGAAACT GTTAAACAGT ATACACAGTT GTCAGTTTGA
TCCACCGAGG CATTAATTTT TTCTTAATCA CACCCTTATA ACAAAAACCT GCATATTTTT
TCTTTTTAAA GAATGAAAAT GAAAGCCAAG TTTCTACAGA TGAAAGTGAG AACTCCAGGT
CTCCTGGAAA TAAATCAGAT AACATCAAGC CCAAATCTGC TCCATGGAAC TCTTTTCTCC
CTCCACCACC CCCCATGCCA GGGCCAAGAC TGGGACCAGG AAAGGTAAAC CTTCTATGAA
AGTTTTCCAG AAAATAGTTA ATGTCGGGAC ATTTAACCTC TCTGTTAACT AATTTGTAGC
TCTCCCATGA AACTTTTGTA GCTTAAATAC ACAAGAATTT TTTGAAAAGG AAATAAGATA
ATGATGCAAA ATAGTTAATT TTTTAAAAAA ATGTTAGACA CTGCAGTGGA TGCAACAAAA
TACTTTATAT GAAAGATTTA TCCAGTTAAC TTTTGTGGAG TATTAGGTAT TAGACTAATA
ATTTGCACAC TTACTTAAGT TAGAAAGTAT AATAATGCGC CGGACGCGGT AGCTCACGCC
TGTAATCCCA GCACTTTGGG AGGCCAAGGT GGGCGGATCA CAAGGTCAGG AGATCGAGAC
CATCCTGGCT AACACGGTGA AACCCCATCT CTACTGAAAA TAGAAAAAAA TTTGCCGGGC
GTGATGGCGG GCACCTGTAG TCCCAGCTAC TCGGGAGGCT GAGGCAGGAG GATGGTGTGA
ACCCCGGAGG CAGAGCTTGC AGTGAGTCAA GATCGTGCCA CTGCACTCCA ACCTGGGCGA
CAGAATGAGA CTCCATCTCA AACAAAAAAA CAAAACAAAA CAAAAAAAAG TGTAATAATA
ATTTATCATT AGCTGGATGA TATGCTGTTG TTTCCCATGT CACCTGTATA AGATATGTAA
AATAAGAACA CATTATTTAC ATCTAATATA GATAAAATCC TGAGGCGCTC TCAGATTGTT
TTGTAGAGTT CAAATGTAAA TATTGTTTTC ATTTATGGTC CTTTTGGTTA TAAGTAACAG
AAATCAACTC TAAAAAGATT TTTATTATAG GTTAGATTAT GTCATGGAAC CTTAAGGCTT
GTCCCTTTCT AGTTCTTTTG TGTAAAGCGG TGATTTCTTC CATGGAGGGA ATGGTATTTA
GGCAATTTTT TTTTTTTTTT CGAGATGGAG TCTTGCTCTG TCGCTCAGGC TGGAGTGCAG
TGGCACCATT TCAGCTCACT GCAACTTCCA CCTCCTGGGT TCAAGTGATT CTCCTGCTTC
AGCCTCCCAA GTAGCTGAGA TTAGAGGCAC CCGCCACCAC ACCCGGCTTA TTTTGTATTT
TTAGTAGAGA TGGGGTTTCA CCATGTTGGC CAGGCTGGTC TTGAACTCCT GACCTCAAGT
GATCTCCCCA CCTTGGCCTT CCAAAGTGCT AGGATTACAG GCGCCTAGCC TAGGCAGTCA
TTTTCAAAAA ACAAGCATGA CTCACCAAAA GTTTTAAGAT TTTCTGTGAT AATGTTCTTA
TTGAGGCTTA CATTATATTA CAGTTTCTTG AATCTAAAAT GATGTACCCT CTTAGAATAT
ATACATCATG CTTCATTGGT CTCAGGGGGC TGATTTTTAT AAGGAGAGAT TTGCTAGTTT
TCACAATATG TCCTCTAAGT TGGCATGTAT AGCTAAACAG GCTTTCATAA AAATATACAA
TTTAGTTAAT GAAATTTGGG ATATAGTCTT TTATGATTGA AATAATTTTG CTAAATAGAC
TGTCTCTGAT TTATTAGGTA ATCACCACTC TTATTTTGTT TTACTTCCTT AATGTCTACA
TAGAAAGGAA ATGAGAAAAA TCCAGAGGTT GTCATTTGAC TTATGAGTCT GTTTGACTTC
AGGATTTGGT ACATGAAATT TCACTTAATC TTTTTGATAT GTATAAAACA AATATTCTGG
GTAATTATTT TTATCCTTTT GGTTTTGAGT CCTTTTTATT CCTATCATAT TGAAATTGGT
AAGTTAATTT TCCTTTGAAA TATTCCTTAT AGCCAGGTCT AAAATTCAAT GGCCCAC+AC
CGCCACCGCC ACCACCACCA CCCCACTTAC TATCATGCTG GCTGCCTCCA TTTCCTTCTG
GACCACCAGT AAGTAAAAAA GAGTATAGGT TAGATTTTGC TTTCACATAC AATTTGATAA
TTAGCAGAAT AGAGGATTGT AAAATGTCAT TGTAGAACAT CCCTTGGGCC AGATTCTAAT
GGGTAGAAAT TTGAACTAAA CCTCTGGGTT TTGTTTGTTT TTAATGCCTT TCTGTTACCC
AGATGCAGTG CTCTTGTAGT CCCAAGTCTA AGCTCTAGGT TGCCTTCTTT CCTGGCAGAA
GTTGGTGTCT ATGCCATAAG GAGGTAGTTC CTGTTAGAAG GGATTTAATT ATACCTTATA
TAAGGAATTA GTGTTTGCCC TTCTAGGTAT AGTTGGATGT TAGCTTCTGA TGTAAACTGG
ATTTCTTTTT CTTTCTCTCT GTTTTTTTTT TTTTGTTTTG GAGGCAGAGT TTTGCCCTTG
TAGCCCAGGC TGGAGTGCAG TGGTGTGATC TCAGCTCACA GCAACCTCCG CCTCCTGGGT
TCAAGCAATT CTGCCTCGGC CTCCCAAGTA GCTGGGATTA CAGGCGACTG CCACCACACC
CGGCTAATTT TTGTTTTATT AGTAGAGATG GGGTTTCACC ATGTTGGCCA GACTGATCTT
GAACTCCTGA CCTCAGGTGA TCCACCCGCC TTGGCCTCCC AAAGCGCTGG GATTACAGGC
GTGAGCTGCC GCACCCAGCT GTAAACTGGA TTTCTAATGG TAGATTTTTA GGTATTAACA
ATAGATAAAA AGATACTTTT TGGCATACTG TGTATTGGGA TGGGGTTAGA ACAGGTGTTC
TACCCAAGAC ATTTACTTAA AATCGCCCTC GAAATGCTAT GTGAGCTGTG TGTGTGTGTG
TGTGTGTGTG TGTATTAAGG AAAAGCATGA AAGTATTTAT GCTTGATTTT TTTTTTTTAC
TCATAGCTTC ATAGTGGAAC AGATACATAG TCTAAATCAA AATGTTTAAA CTTTTTATGT
CACTTGCTGT CTTTTCGTCC TCGTTAAATT TAATTTTGTT GGTCTTTTGT TGTTATTGGT
TGGTTTTCTC CAAATGCTAG CTATGTTAAG AAATTTAAGG CCAGGTACAG TGGCTCATGC
CTGTAATCCC GGCATTTTAG AAGGCTGAGG CAGGAGGATC ACTTGAGCTC AGGAGTTTGA
GACCAGTCTG GGCAACATAG CAAGACCTCG TCTTTGTTTA GGGGAAAAAA AAGAAATTTA
AGTAGGAGAT TATATAAGCA AAAATACAAT TAATTTCCAG CATTCACTAT ATAATATAAA
TCTCCAGACT TTACTTTTTT GTTTACTGGA TATAAACAAT ATCTTTTTCT GTCTCCAGAT
AATTCCCCCA CCACCTCCCA TATGTCCAGA TTCTCTTGAT GATGCTGATG CTTTGGGAAG
TATGTTAATT TCATGGTACA TGAGTGGCTA TCATACTGGC TATTATATGG TAAGTAATCA
CTCAGCATCT TTTCCTGACA ATTTTTTTGT AGTTATGTGA CTTTGTTTTG TAAATTTATA
AAATACTACT TGCTTCTCTC TTTATATTAC TAAAAAATAA AAATAAAAAA ATACAACTGT
CTGAGGCTTA AATTACTCTT GCATTGTCCC TAAGTATAAT TTTAGTTAAT TTTAAAAAGC
TTTCATGCTA TTGTTAGATT ATTTTGATTA TACACTTTTG AATTGAAATT ATACTTTTTC
TAAATAATGT TTTAATCTCT GATTTGAAAT TGATTGTAGG GAATGGAAAA GATGGGATAA
TTTTTCATAA ATGAAAAATG AAATTCTTTT TTTTTTTTTT TTTTTTTTGA GACGGAGTCT
TGCTCTGTTG CCCAGGCTGG AGTGCAATGG CGTGATCTTG GCTCACAGCA AGCTCTGCCT
CCTGGATTCA CGCCATTCTC CTGCCTCAGC CTCAGAGGTA GCTGGGACTA CAGGTGCCTG
CCACCACGCC TGTCTAATTT TTTGTATTTT TTTGTAAAGA CAGGGTTTCA CTGTGTTAGC
CAGGATGGTC TCAATCTCCT GACCCCGTGA TCCACCCGCC TCGGCCTTCC AAGAGAAATG
AAATTTTTTT AATGCACAAA GATCTGGGGT AATGTGTACC ACATTGAACC TTGGGGAGTA
TGGCTTCAAA CTTGTCACTT TATACGTTAG TCTCCTACGG ACATGTTCTA TTGTATTTTA
GTCAGAACAT TTAAAATTAT TTTATTTTAT TTTATTTTTT TTTTTTTTTT GAGACGGAGT
CTCGCTCTGT CACCCAGGCT GGAGTACAGT GGCGCAGTCT CGGCTCACTG CAAGCTCCGC
CTCCCGGGTT CACGCCATTC TCCTGCCTCA GCCTCTCCGA GTAGCTGGGA CTAGAGGCGC
CCGCCACCAC GCCCGGCTAA TTTTTTTTTA TTTTTAGTAG AGACGGGGTT TCACCGTGGT
CTCGATCTCC TGACCTCGTG ATCCACCCGC CTCGGCCTCC CAAAGTGCTG GGATTACAAG
CGTGAGCCAC CGCGCCCGGC CTAAAATTAT TTTTAAAAGT AAGCTCTTGT GCCCTGCTAA
AATTATGATG TGATATTGTA GGCACTTGTA TTTTTAGTAA ATTAATATAG AAGAAACAAC
TGACTTAAAG GTGTATGTTT TTAAATGTAT CATCTGTGTG TGCCCCCATT AATATTCTTA
TTTAAAAGTT AAGGCCAGAC ATGGTGGCTT ACAACTGTAA TCCCAACAGT TTGTGAGGCC
GAGGCAGGCA GATCACTTGA GGTCAGGAGT TTGAGACCAG CCTGGCCAAC ATGATGAAAC
CTTGTCTCTA CTAAAAATAC CAAAAAAAAT TTAGCCAGGC ATGGTGGCAC ATGCCTGTAA
TCCGAGCTAC TTGGGAGGCT GTGGCAGGAA AATTGCTTTA ATCTGGGAGG CAGAGGTTGC
AGTGAGTTGA GATTGTGCCA CTGCACTCCA CCCTTGGTGA CAGAGTGAGA TTCCATCTCA
AAAAAAGAAA AAGGCCTGGC ACGGTGGCTC ACACCTATAA TCCCAGTACT TTGGGAGGTA
GAGGCATGTG GATCACTTGA GGTTAGGAGT TCAGGACCAG CCTGGCCAAC ATGGTGACTA
CTCCATTTCT ACTAAATACA CAAAACTTAG CCCAGTGGCG GGCAGTTGTA ATCCCAGCTA
CTTGAGAGGT TGAGGCAGGA GAATCACTTG AACCTGGGAG GCAGAGGTTG CAGTGAGCCG
AGATCACACC GCTGCACTCT AGCCTGGGCA ACAGAGTGAG AATTTGCGGA GGGAAAAAAA
AGTCACGCTT CAGTTGTTGT AGTATAACCT TGGTATATTG TATGTATCAT GAATTCCTCA
TTTTAATGAC CAAAAAGTAA TAAATCAACA GCTTGTAATT TGTTTTGAGA TCAGTTATCT
GACTGTAACA CTGTAGGCTT TTGTGTTTTT TAAATTATGA AATATTTGAA AAAAATACAT
AATGTATATA TAAAGTATTG GTATAATTTA TGTTCTAAAT AACTTTCTTG AGAAATAATT
CACATGGTGT GCAGTTTACC TTTGAAAGTA TACAAGTTGG CTGGGCACAA TGGCTCACGC
CTGTAATCCC AGCACTTTGG GAGGCCAGGG CAGGTGGATC ACGAGGTCAG GAGATCGAGA
CCATCCTGGC TAACATGGTG AAACCCCGTC TCTACTAAAA GTACAAAAAC AAATTAGCCG
GGCATGTTGG CGGGCACCTT TTGTCCCAGC TGCTCGGGAG GCTGAGGCAG GAGAGTGGCG
TGAACCCAGG AGGTGGAGCT TGCAGTGAGC CGAGATTGTG CCAGTGCACT CCAGCCTGGG
CGACAGAGCG AGACTCTGTC TCAAAAAATA AAATAAAAAA GAAAGTATAC AAGTCAGTGG
TTTTGGTTTT CAGTTATGCA ACCATCACTA CAATTTAAGA ACATTTTCAT CACCCCAAAA
AGAAACCCTG TTACCTTCAT TTTCCCCAGC CCTAGGCAGT CAGTACACTT TCTGTCTCTA
TGAATTTGTC TATTTTAGAT ATTATATATA AACGGAATTA TACGATATGT GGTCTTTTGT
GTCTGGCTTC TTTCACTTAG CATGCTATTT TCAAGATTCA TCCATGCTGT AGAATGCACC
AGTACTGCAT TCCTTCTTAT TGCTGAATAT TCTGTTGTTT GGTTATATCA CATTTTATCC
ATTCATCAGT TCATGGACAT TTAGGTTGTT TTTATTTTTG GGCTATAATG AATAATGTTG
CTATGAACAT TCGTTTGTGT TCTTTTTGTT TTTTTGGTTT TTTGGGTTTT TTTTGTTTTG
TTTTTGTTTT TGAGACAGTC TTGCTCTGTC TCCTAAGCTG GAGTGCAGTG GCATGATCTT
GGCTTACTGC AAGCTCTGCC TCCCGGGTTC ACACCATTCT CCTGCCTCAG CCCGACAAGT
AGCTGGGACT ACAGGCGTGT GCCACCATGC ACGGCTAATT TTTTGTATTT TTAGTAGAGA
TGGGGTTTCA CCGTGTTAGC CAGGATGGTC TCGATCTCCT GACCTCGTGA TCTGCCTGCC
TAGGCCTCCC AAAGTGCTGG GATTACAGGC GTGAGCCACT GCACCTGGCC TTAAGTGTTT
TTAATACGTC ATTGCCTTAA GCTAACAATT CTTAACCTTT GTTCTACTGA AGCCACGTGG
TTGAGATAGG CTCTGAGTCT AGCTTTTAAC CTCTATCTTT TTGTCTTAGA AATCTAAGCA
GAATGCAAAT GACTAAGAAT AATGTTGTTG AAATAACATA AAATAGGTTA TAACTTTGAT
ACTCATTAGT AACAAATCTT TCAATACATC TTACGGTCTG TTAGGTGTAG ATTAGTAATG
AAGTGGGAAG CCACTGCAAG CTAGTATACA TGTAGGGAAA GATAGAAAGC ATTGAAGCCA
GAAGAGAGAC AGAGGACATT TGGGCTAGAT CTGACAAGAA AAACAAATGT TTTAGTATTA
ATTTTTGACT TTAAATTTTT TTTTTATTTA GTGAATACTG GTGTTTAATG GTCTCATTTT
AATAAGTATG ACACAGGTAG TTTAAGGTCA TATATTTTAT TTGATGAAAA TAAGGTATAG
GCCGGGCACG GTGGCTCACA CCTGTAATCC CAGCACTTTG GGAGGCCGAG GCAGGCGGAT
CACCTGAGGT CGGGAGTTAG AGACTAGCCT CAACATGGAG AAACCCCGTC TCTACTAAAA
AAAATACAAA ATTAGGCGGG CGTGGTGGTG CATGCCTGTA ATCCCAGCTA CTCAGGAGGC
TGAGGCAGGA GAATTGCTTG AACCTGGGAG GTGGAGGTTG CGGTGAGCCG AGATCACCTC
ATTGCACTCC AGCCTGGGCA ACAAGAGCAA AACTCCATCT CAAAAAAAAA AAAATAAGGT
ATAAGCGGGC TCAGGAACAT CATTGGACAT ACTGAAAGAA GAAAAATCAG CTGGGCGCAG
TGGCTCACGC CGGTAATCCC AACACTTTGG GAGGCCAAGG CAGGCGAATC ACCTGAAGTC
GGGTGTTCCA GATCAGCCTG ACCAACATGG AGAAACCCTG TCTCTACTAA AAATACAAAA
CTAGCCGGGC ATGGTGGCGC ATGCCTGTAA TCCGAGCTAC TTGGGAGGCT GAGGCAGGAG
AATTGCTTGA ACCGAGAAGG CGGAGGTTGC GGTGAGCCAA GATTGCACCA TTGCACTCCA
GCCTGGGCAA CAAGAGCGAA ACTCCGTCTC AAAAAAAAAA GGAAGAAAAA TATTTTTTTA
AATTAATTAG TTTATTTATT TTTTAAGATG GAGTTTTGCC CTGTCACCCA GGCTGGGGTG
CAATGGTGCA ATCTCGGCTC ACTGCAACCT CCGCCTCCTG GGTTCAAGTG ATTCTCCTGC
CTCAGCTTCC CGAGTAGCTG TGATTACAGC wATATGCCAC CACGCCCAGC CAGTTTTGTG
TTTTGTTTTG TTTTTTGTTT TTTTTTTTTG AGAGGGTGTC TTGCTCTGTC CCCCAAGCTG
GAGTGCAGCG GCGCGATCTT GGCTCACTGC AAGCTCTGCC TCCCAGGTTC ACACCATTCT
CTTGCCTCAG CCTCCCGAGT AGCTGGGACT ACAGGTGCCC GCCACCACAC CCGGCTAATT
TTTTTGTGTT TTTAGTAGAG ATGGGGTTTC ACTGTGTTAG CCAGGATGGT CTCGATCTCC
TGACCTTTTG ATCCACCCGC CTCAGCCTCC CCAAGTGCTG GGATTATAGG CGTGAGCCAC
TGTGCCCGGC CTAGTCTTGT ATTTTTAGTA GAGTCGGGAT TTCTCCATGT TGGTCAGGCT
GTTCTCCAAA TCCGACCTCA GGTGATCCGC CCGCCTTGGC CTCCAAAAGT GCAAGGCAAG
GCATTACAGG CATGAGCCAC TGTGACCGGC AATGTTTTTA AATTTTTTAC ATTTAAATTT
TATTTTTTAG AGACCAGGTC TCACTCTATT GCTCAGGCTG GAGTGCAAGG GCACATTCAC
AGCTCACTGC AGCCTTGACC TCCAGGGCTC AAGCAGTCCT CTCACCTCAG TTTCCCGAGT
AGCTGGGACT ACAGTGATAA TGCCACTGCA CCTGGCTAAT TTTTATTTTT ATTTATTTAT
TTTTTTTTGA GACAGAGTCT TGCTCTGTCA CCCAGGCTGG AGTGCAGTGG TGTAAATCTC
AGCTCACTGC AGCCTCCGCC TCCTGGGTTC AAGTGATTCT CCTGCCTCAA CCTCCCAAGT
AGCTGGGATT AGAGGTCCCC ACCACCATGC CTGGCTAATT TTTTGTACTT TCAGTAGAAA
CGGGGTTTTG CCATGTTGGC CAGGCTGTTC TCGAACTCCT GAGCTCAGGT GATCCAACTG
TCTCGGCCTC CCAAAGTGCT GGGATTACAG GCGTGAGCCA CTGTGCCTAG CCTGAGCCAC
CACGCCGGCC TAATTTTTAA ATTTTTTGTA GAGACAGGGT CTCATTATGT TGCCCAGGGT
GGTGTCAAGC TCCAGGTCTC AAGTGATCCC CCTACCTCCG CCTCCCAAAG TTGTGGGATT
GTAGGCATGA GCCACTGCAA GAAAACCTTA ACTGCAGCCT AATAATTGTT TTCTTTGGGA
TAACTTTTAA AGTACATTAA AAGACTATCA ACTTAATTTC TGATCATATT TTGTTGAATA
AAATAAGTAA AATGTCTTGT GAAACAAAAT GCTTTTTAAC ATCCATATAA AGCTATCTAT
ATATAGCTAT CTATATCTAT ATAGCTATTT TTTTTAACTT CCTTTATTTT CCTTACAGGG
TTTTAGACAA AATCAAAAAG AAGGAAGGTG CTCACATTCC TTAAATTAAG GAGTAAGTCT
GCCAGCATTA TGAAAGTGAA TCTTACTTTT GTAAAACTTT ATGGTTTGTG GAAAACAAAT
GTTTTTGAAC ATTTAAAAAG TTCAGATGTT AGAAAGTTGA AAGGTTAATG TAAAACAATC
AATATTAAAG AATTTTGATG CCAAAACTAT TAGATAAAAG GTTAATCTAC ATCCCTACTA
GAATTCTCAT ACTTAACTGG TTGGTTGTGT GGAAGAAACA TACTTTCACA ATAAAGAGCT
TTAGGATATG ATGCCATTTT ATATCACTAG TAGGCAGACC AGCAGACTTT TTTTTATTGT
GATATGGGAT AACCTAGGCA TACTGCACTG TACACTCTGA CATATGAAGT GCTCTAGTCA
AGTTTAACTG GTGTCCACAG AGGACATGGT TTAACTGGAA TTCGTCAAGC CTCTGGTTCT
AATTTCTCAT TTGCAGGAAA TGCTGGCATA GAGCAGCACT AAATGACACC ACTAAAGAAA
CGATCAGACA GATCTGGAAT GTGAAGCGTT ATAGAAGATA ACTGGCCTCA TTTCTTCAAA
ATATCAAGTG TTGGGAAAGA AAAAAGGAAG TGGAATGGGT AACTCTTCTT GATTAAAAGT
TATGTAATAA CCAAATGCAA TGTGAAATAT TTTACTGGAC TCTATTTTGA AAAACCATCT
GTAAAAGACT GAGGTGGGGG TGGGAGGCCA GCACGGTGGT GAGGCAGTTG AGAAAATTTG
AATGTGGATT AGATTTTGAA TGATATTGGA TAATTATTGG TAATTTTATG AGCTGTGAGA
AGGGTGTTGT AGTTTATAAA AGACTGTCTT AATTTGCATA CTTAAGCATT TAGGAATGAA
GTGTTAGAGT GTCTTAAAAT GTTTCAAATG GTTTAACAAA ATGTATGTGA GGCGTATGTG
GCAAAATGTT ACAGAATCTA ACTGGTGGAC ATGGCTGTTC ATTGTACTGT TTTTTTCTAT
CTTCTATATG TTTAAAAGTA TATAATAAAA ATATTTAATT TTTTTTTAAA TTA
Homo sapiens SMN2 pre-mRNA nucleic acid sequence
(SEQ ID NO: 64)
CCACAAAUGU GGGAGGGCGA UAACCACUCG UAGAAAGCGU GAGAAGUUAC UACAAGCGGU
CCUCCCGGCC ACCGUACUGU UCCGCUCCCA GAAGCCCCGG GCGGCGGAAG UCGUCACUCU
UAAGAAGGGA CGGGGCCCCA CGCUGCGCAC CCGCGGGUUU GCUAUGGCGA UGAGCAGCGG
CGGCAGUGGU GGCGGCGUCC CGGAGCAGGA GGAUUCCGUG CUGUUCCGGC GCGGCACAGG
CCAGGUGAGG UCGCAGCCAG UGCAGUCUCC CUAUUAGCGC UCUCAGCACC CUUCUUCCGG
CCCAACUCUC CUUCCGCAGC CUCGGGACAG CAUCAAGUCG AUCCGCUCAC UGGAGUUGUG
GUCCGCGUUU UUCUACGUCU UUUCCCACUC CGUUCCCUGC GAACCACAUC CGCAAGCUCC
UUCCUCGAGC AGUUUGGGCU CCUUGAUAGC GUUGAGUGGA GGCCCUGCCG CGACUUGGCA
GUAGCUUAUU UUGUUCACUC CUCUCUGGCU GGUGUGGGGG AGGUGGGGGC AUUAGGCCAG
GGUGAAGCAG GGGAACCACU UAGGAGUCUG UUAAGAUGAU CUGAACUUCA GAACAAGAUG
UUAUUAACAG AGUGAAAGUA UUUGGAUUCU GGGUAUAUUU UGAAAUCGGA GGCAACAGGU
UUUUCAGAUA GAUUCGAUAA CGGAGGUUAU CCUGAAUAGU UGAAAAGAUA AAGUUGCCUU
UUGCUGAGGU GGGAAAGAGA AGAUUGCCAG UAGAGCAGGU UUCUCAGGAG UUCAGUCUUG
GGCAUAGCAU GGUAGGGGUG AAUUUGGCUG GAGUGAGUUG GAGAGUAGGA GAAGAGAAAU
CCAAGGCAAC AUUUGACCAG CCUGGGCAAC AUAGUGUGAC UCCGAGUCUG CAAAAAUUAG
ACGGGUGUUG UGGUGCGCGU CUGUGGUCUC AGCUACCUGG AAGGUUCAGG CCUUGGAAGG
CUCAGGGAGG UGGAGGCUGC AGUGAUCUGU GAUUGCGCCU CUGCACUCCA GCCUGGGCGA
CAGAGCCAGA CCCUGUCUUA AAACAAAAUA AACGGCCGGG CGCGGUGGCU CAAGCCUGUA
AUCCCAGCAC UUUGGGAGGC CGAGGCGGCC GGAUCACAAG GUCAGGAGAU CGAGACCAUC
CUGGCUAACA CGGUGAAACC CCGUCUCUAC UACAAAUACA AAAAAUUAGC CGGGCGUGGU
GACGGGCGCC UGUAGUCCCA GCUACUCGGG AGGCUGAGGC AGGAGAAUGU CAUGAAGCCG
GGAGGCGGAG CUUGCAGUGA GCCGAGAUCG CGCCACUGCA CUCCAGCCUG GGCGAUAGAG
CAAGACUCCG UCUCAAAUAA AUAAAUAAAU AAAUAAAUAA AUAAUAAAAA CAUCGGUAGG
CAUAUUUCAA GGAAUUCUAU UUAAAAAAAA UUUUUUUAGA GACAAGUUCG CUCUCUGUGG
CCCAGGCUGG AGUACAGUGG CAUGAUCCUA GCCCAUGGCA GCGUUGAUCU CUUGGCCUCA
AGOGACCCUC CUUUGGAGUC GCUGGGCCUA AAGGAGUGAG CCACCACGAA AUUUUAUUAU
AAAUGGAGGG UAGAGAAAUU GGGCAAUAAA UGGAGGGGGA AGUGAGUUAA GAGGAAUUUU
AAUUAUGUGU GUGUGGUUUU AAAAGAGGGG GGUCUUGCUC UGUUGCCCAG GCUGCUGGGG
UGCCAGUGGC GCAAUCAUGA AUCACUACAG CCUUGGACUC CUGGCCUCAA GCUAUCCUCC
CACCUCUGCC UCCCAAAGUA CUGGGAUUAC UAGUGUGAGC CACUGCACUA AGAUAGGAGC
AACAUGUUUC AGCAUGUUUG UGGGUUGAUA GGAAAGAUGA GAAUGGGAAA GUUGAUGUCG
GAAAGAAGAC AAUGGCUAGA GCAAUGUCCU AGAGUAGGUA AGAAGGGAUG GAUUUGGCCU
UUGUUGGAAA CAUUAGCGGU UCUUUUGGUG ACAGCUAUAU AGUUAACACA UCUAUGAUAC
GUGAAUGGGC AGAUAGGAUG GCAGGAGAUU UUGAAAGUUC UCUUGAUUCU UACUGUUCUC
UUAGUGAAAG AAGCAAGGUU AUCAGCUAGA AGCUGGGAUG GGAGAGGAAA GAGAAGAUGG
GAAGUAGAUA GUUCUUUAGA AGAGUGGGCA AGGGUUGGAC UAGGGAAGUU UAGUGGAAAU
AUUGCUAGGC AACAUAAAGA GCCUACUUGA GAUUCGUGGU CAUGAGUUGA AGGAGACCAG
ACAGCAAGAU UGUGUAUGAG GGCACCCACA GAGUAAAUGG AGAGUUGAAA UUAAUGCAGU
UGUGAUUUUA CCACGUGGAU AUGAAGAAGU GAGGGGGAGA AGUACAAAGG AGUUCUCUUA
AUGAUUGACC AUGGAAUUUA AGCUGGCUAA GAAAGGAAGU GAGAGGCCGG GCGCGGUGGC
UCACGCCUGU AAUCCCAGCA CUUUGGGAGA CUGAGGUGGG UGGAUUACCU GAGGUCAGGA
GUUUGAGACC AACCUGGCCG AUAUGGCGAA ACCCCAUCUC UAAUAAAAAU ACAGAAAAAU
UAGCCGGGAA UGGUGGCAGG UGCCUGUAAU CCCAGCUACU CAAGAGGCUG UGGCAGGAGU
AUCCCUUGGA CCCAGGAGGU GGAGGUUGCA GUGAGCCGAG AUCACGCCAC UGUACUCCAG
CCUGGACGAU AUAGUGAGAC UUCACCUCAA AAAAAAAAAA AAAGAAAGGA AGUGAGGAUU
UUAAGACCCU GAGAGACAGU UUAAAAAGUG GGAGGAUCGG CCGGGCGCUG UGGCUGACAC
CUGUAAUCCC AGCACUUUGG GAGGCCGAGU UGGGCAGAUC ACAAGGUCAG GAGUUCGAGA
CCAGCCUGGC CAAUAUGGUG AAACCUUGUC UCUACUAAAA AUACAAAAAU UAGCCGGGCA
UGGUGUCACG UGUCUAUAAU CCCAGCUACU CGGGAGGCUG AGGCAGAAAA AUUGCUUGAA
CCUGGGAGGC AGAGGUUGCA GACAGCUGAG AUCACUCCAU UGCACUCCAG CCUbGGCAAC
AAGAGCAAAA CUUUGUCUUU AAAAAAAAAA AAAAAAAAAG AAUACAAAAA UUAGCCGGGC
GUGGUGGCGC GUGCCUAUAA UCCCAGCUAC UUGGGAGGCU GAGGCAGGAG AAUCAGUUGA
ACACGGGAGG CGAGGUUUGC AGUGAGCCGA GAUUGCGCCA CUGCACUCCA GCCUGGGCGA
CAGAGCAGGA CUCCUCUUGG AAAAAAAAAA UUAGCUGGGC AUGGUGGCAG GUGCCUGUAG
UCUCAGCUAC UAGGGAGGCU GAGGCAGGAA AAUCACUUGA ACCCGGGAUG UGGAGUUUGC
AGUGACCCGA GAUCGUGCCA CUGUACUCCA UCCUGGGCGA CAAAAUGAGA CUCUGCCUCA
AAAAAAAAAA AAAAAAAAAG UGGGAGGAUC AAUGUACUGC CAGUCCUAAU GAAGUGGAAU
GAUUGUCCCC AUCAAAUCAC UAGUAGGAGU AAGUUGCAGA GCCUAGAAGG UGAUGGUUAA
GAGAGUGGGA UUCUUGAAAC UGCAUUUAUG GAGAGGUUGU GGUUAUUGGU UAUAAUAAAU
AAAUACAGUU GAAGUGAGUG AGUAGCUGAG AUUUGGGGAU GUAUCAGUUC AUUCUUACAC
UGCUACAAAG ACAUACCUGA GACCAGGUAU UUAUAAAGAU AAGAGGUUUA AUCAGCUCAC
AGUUCUGCUG CCUGUACAGG CUUCUCUUGU GGAGGCCUAA GGAAACUUAC AGUCAUGGUG
GAAGGUGAAG GGGAAACAAG CACAGUCUUC ACAUGGCCAG CAGGAGAGAG AGAGAAGGGG
GAAGUGCUAC AUACUUUAAA ACAACCAGAU CUUGUGAGAA CGCUUAUCAG GAAACAGCAC
UUGGGGAUGG UGCUAAAUCA UUAGAAAUCA CCCCCAUGAU CCAGUCGCCU CCUACCAUGC
CCACCUCCAA CACUGGGGAU CACAAUUCAG CAUGAGAUUU GGGUAGGAAC ACAGAGCUGC
ACCACAUCAG AGGAUGUACA AGAUUGUGGU GGAGAGGAGU UUAGAGACCU GCAAAUAUAG
GGUAAUUGAA GGGAUCAUCU ACAUGGAUAU UUAAAUCACC AAAAAUUAUG ACAGGAGUAG
UGUUGGAGAG AGAACUGCGA UGUAAACAUU AAGGAAUGAG GAAGAGUGAC UCGGUAGGCU
GUAGGUGACU GCAAUAGGAA ACGAUAAUAG ACUGUGAGUC UGGUGACAAG AUUUUCCUUC
UUUCUUUUUU UCCCCCCCCC CGAGACAGGG CCUCUUUUUG UUGCCCAGGU GGGAGUGCAG
UGGCGCGAUC ACGGCUCACU ACAACCUCCU CCCAAGCUCA AGGGAUUCUC CCACUUCAGC
CUCUCAAGUA GCUGGAACUA CAGGUGCUGA CCACCAUGCC UGGCUACUUU UUGUCAGGAU
UUUCAAGGCU GGGAAUUUUG AGAGGGGAAU GGAGGAGAAU AAUCUGAAAG UGCAAGUAAG
GAGCAGGGAA GAUUUCUUUU UUCUUUUUUU UUUUUUUUUU UGAGUCGGAG UCUGGCUCAG
UCGCCCAGGC UGGAGUGCAG UGGCGAGAUC UCCGCUCACU GCAAGCUCCG CCUCCCGUGU
UCACGCCAUU CUCCUCCUUC AGCCUCCCGA GUAGCUGGGA CUACAGGCGC CCGCCACCAC
GCCCAGCUAA UUGUUUUUUU GUAUUUUUAG UAGAGACGGG GUUUCACCGU GUUAGCCAGG
AUGGUCUCAA UCUCCUGACU UUGUGAUCCG CCCACCCCGG CCUCCCAAAG CGCUUGGGAU
UACAGGCGUG AGCCACCGCG CCAGCCAGAG CAGGGAAGAU UUCUUCCCCA CAUCUCCAGU
AGGUACAGUG AUAUGAAGUG UGUGGAGGAG AAAAGAGGAA ACAUCUAUCA UUUGAGAUGG
CUGCGAAAGG AAAAGGCAUC CUCAGGGAGC UAGAUUUUAC UUAGAGCAAG AAAUGAAGGG
AUGAUUCAGA GGUUAAAAGA GUGGAUUUUA UGAAUUACUC AAGGGAGCAC AGUGGAAGUU
UCAGGAAGUG GUAGGAGAAG GUAGAAGAUG GCAGGGUGUU GGGAAUAAUU UGAGAAAUCU
GAGCUACUGG AAAUGACUGA GAAUCAGAUA UAAAGGCAGU CCUGGUGGUC CGUUCUGGCU
GCCGUUGCUG UGUAACGAAU CUGCCAAAAC UUAGUGGCUU GAAACAACAA AGAACAUUUU
AUUAUCUCUC AUUGUUUCUG UGGGUUAGGA AUUUGUGAGA GCCGUGCUGG GCAGUUUUCG
UGCGGCUGUC UCGUGGUUGC ACCUACAUAG UUGCUAGAGC UACAGUAGCU GGGGACUGAG
CAGCUAGGGA UUGGCAGGCU AUCUCUUUUU UUCAUGUAGU CUCAUGAAGA UUUCUUUAUG
UGGUUUCAAU GUGUGGGCUG GUUUGGAUUU CCUUAUAGCA UGGUGGCCUC AGUUGGAUUG
CUGUUUUGUG AUCCUUUUCA UCCCUCCUUG UCCUGUCCCC AGACAACCAC UGAUCUACUU
UCUGUCACCA UAGAUUAGCC UGCAUUUUUA AGAAUUUUUA UAAACGUGGA AUGAUAGAGU
ACCUUUUUUG UCACGUUUCU UUUAUUUAUC AUAGCUAUUU UGAUUUUCAU CCAUUUUAUU
GCUGAGUAGU AUCCCAUUGC AUGUAUAUAC UAUACUGUAU UCAUUCGCUU GCUUGUGAAC
AUUUGGGCUU UUUCCAGUUU GGGACUGUUA ACAAGUAGAG CCACUAUGAA UAUUAGUGUA
UAAGACUUCA UAUAGCCAAG GCUGGCAGAU CGCUUGAGCC CAGGAGUUUG AGACCAGCCU
GGGAAACAUG GUGAAACCUC UAUUUUUAUU UUAAAAUCAA AAAUUAAAAA UUUUCUAUAA
AAAAUUUUAA AGAAGACUUU GUAUAGACAU ACGCUUUCAU UUUUCUUGAG UGAAUACUUA
GGUCUCAGGG UAGAUGUAUU UUAAGUCUUU AAGGAGCUGU CAAACUCUUC CUCAAAGUGG
UGGUUGUACC AUGUUACUUU UUAAUAUAAC AGAGAUUAAU UGAGCAAAGA AAAAUUCAAA
AGUUGGACAG CCCCCACAAC UAAAUAGGUU CAGAACAGCU CCCCCAUUUU GCAUUUUGAC
CAGCAAUGUA UGAAAGUUCC AUUUGCUCAG UGUCCCUGCA AACACCUGGU AUGGUCAGUC
UUUUUAAUUU UAGGCAUUAU AAUAGAUAUA GUGGCUUCUU GUGAUUUUAA UUAGCAUUUC
CUAAUGACCA GUGCUGCUGU UGAUCAUUUC AUGAGUGUAU UUGCCAUCCG UAUAUCUUUU
UUGGUGAAGU GUCUAUUCAA AUCAUUUGGG UUUUUUUUUU UUUUGUUUUU UUUUUUUGGA
GACAGUGUCU CACUCUGUCA CCCAGGCUGU UGUGCAGUGG UGCAAUCACA CAGCCUACUG
CAGCCUCCAC CUCCUGCGCU CAGUCUUCUU GUCUCAGCCU UCUGAGUAGC UGAAAUUACG
AGCACACGCC ACAAUGCCUG GCUAAUUUUU UAAAAUUUUG UAGAAACAAG GUCUCAUUAU
GUUGCCUGGG CUUGUCGUGA ACUCCUGGGC UCAAGCAAUC UUCCUGCCUC AGCCUCCCAA
AGAUUGGGAU UGCAAGUAUG AGCCACUGCA CCCGGCCAAC UUACCCAUCU UUUAAUUGAA
UUUUUUUGUU GUUGAGGUUU GAGAGUUCUU CAUGUUUGCU GGGUACAAUA UCUUUAUCAG
AUAGGUAACU UGCAUGUAUU UUCUCCCGGU UUACACUUUG GUUUUUCAUU UUGUUAACAA
CGUCUUUUUA AGAACAGAAA AUCUUAAUUU UGCUGAAAUC UAAUUUUUCA GUUUUUUCUU
UGAUGGUUUU GAGAGAGGAG GUAAAAAAAG ACUAGGUAAG CCGAUAGUUA GACAGAGUCC
UCGGUAGAAC UUCCCUUCUA ACAAAAAGCA GCCCAAGAAA UCACUUCUCU UCUAACAAGG
AGCAGCCUGG AAGAUCGGGC UGUAAACAUG UAUAAGGAAG CAGCUCUGGC ACAGAGGGGG
AGCUUCCUGG GUAAUCAGCA AGCUUCACAU ACGUAAGGUG GGUAUGUGAA GUAAACACAG
UAUGUGAAGU AAACACAGUG GACCUUAGUA CAUACUCAGA UAAGGAAGCQ GGAAGCUUGC
AUGUUGUGAG UUGUUGGGGU UGCCUGCAGC UGCACGGAGA GAAAGGGGUA CCUGGGGCCA
GGCAUGUCCA CCAUGGUGGC UCCACCUCCC CUUAUUUAGC ACAUGCACAA UAGGAAAGAG
AUAAGCAAUG UGGAGUAGCU CAGGCCAAGG ACCUGCCUGC AUAAUAAAAG GUUGGGGUGG
GGGAUGCCAG AGAUUCACGC UCUGUGCAGA UGGCAACACC UGGUCCUAAC UGGUUUUUUG
CUCCCUAUGU GUAGAUAAGC UACCCCCUUC CCAUUAGCUC AUUUAUAAAA AUGCUUGCAU
UUCACUGUGG AAUGGGAACU CUUUUCAGGA CCUCUCUCUG CAGGAGAGAG CUAGUCUCUU
UCUUUUGCCU AUUAAACUUC UGCUCUAGCC UCACACCCUU GGUGUGUCAG CGUCCUUGAU
UUCCUCAGCG UGAGACCAAG AACCUCGGGU GCCACCCCAG GCAACAAGGC CAUUUCAGUU
UGUUCUUUUG UUAUAGGCAA UCCAUGAUCA CAGAUUUUUC UCUCUUUUUU UUUUUUACAC
AGUUUAGAGU UUUAGUUUUA CACUUAGGUC UGUAAUCCAU UUUGUAUUAA UUCUUAUAUG
UGGCUCAGUG UAGGUGGAAA UUUGGUUUGU UUUUGCAUAA GGAUUUCCAA UAGUUUUACC
ACCAUUUCUU GAAACUACUA UGCUUUCUCU AUUAAACCAC AUUUGUAACU UUAGUUAAAA
UCAGUCACAU AUAUCACAGG GCUAUUUCUG ACUCUCAAUU CUGUUACAUU GUCUAUUAGU
GUAUAUUGAU GUCAGUACUA CACUUUUAAU UACUAUUGCU UCAGGGUAUG UCUUGUAAAC
CAAAAAUAAA AUUAUAGGCC CCCCCCGCCC CUGCACAACC AACUGAAUGG ACCCAUCCUC
UCAGCCAAGG GCAUUCCAAA AUUAACCUGA AAAACUAGUU CAAGCCAUGA UGGGAAGGGG
GAGUUGGACA UGUCUCAUCA CACCCUACUA CCUUUUGGAA UUACUGAUAG AACAGACUCU
UAAAGUCUGA AAAGAAACAU UUACAACCUA CCCUCUCUGA AGCCUGCUAC CUGGGAGCUU
CAUCUGCAUG AUAAAACCUU GGUCUCCACA ACCCCUUAUG GUAACCCAAA CAUUCCUUUC
UGUUGAUAAU AACUCUUUCA ACUAGUUGCC AAUUAGAAAA UCUUUAAAUC UUCCUAUGAC
CUAGAAACCU CCCUACCCCC ACUUUGAGUU GUCCUGCCUU UCCUGACAGA ACUCAUGUAC
AUCUUACAUA UAUUGAUUGA UGCCUCAUGU CUCCCUAAAA UGUAUAAAAC AAAGCUGUAC
CCCACCACCU UGGGGACAUG UCAUCAGGAC CUCCUGUGGC UGUGUCAUAG GAGCGUCUUU
AACUUUGGCA AAAUAAACUU UCUAAAUUGA UUGAAACCUG UCUUAGCUAC UUCUGGUUUA
CAGUCUUAAA GUUAGAUAAU GUAAAUUGUC CAGCUUUGGU UUAUUUUUGU CCUUAGUAGU
UCCAUAUAAA UUUUAGAAUC AGCUUUUCAA UUUAAUACAC UACUUUCCUC UUAGAUCCAC
AAUUAAAUAU AUUUGAUGCU AACAAUUCUG UUUUAUGUUU UUCGUUUUUU UUUUUUGAGA
CAAGAGUUUC GCUCUUGUUG CCCAGGCUGG AGUGCAGUGG CGCGAUCUUG GCUCACCACA
ACCUCCACCU CCCAGGUUCA AGCAAUUCUU CUGCCUCAGC CUCCCGAGUA GCUGGGAUUA
CAGGCAUGCG CCACCACGCC CGGCUAAUUU UGUAUUUUUA GUAGAGACGG GGUUUCACCA
UGUUGAUCAG GCUGGUCUUG AACUCCUGAC CUCAGGUGAU CCACCCACCU CGGCCUCCCA
AAGUGUUGGG AUUACAGGCG UGAACCACCA UGCCUGGCCA GUUCUGUUAU UUUUAAAACC
CAAGUUUCCC UGGUCAUAUC UUGGUUGGAU GAAGCGUAUU UUCAAUAGAU UACCCUGGAA
AGGCUAGUGA GUACGGUAUU CUUCUACAUU UUAGACUUUU CUUAGUCUUG CUACUUCAAG
GACAGCUAGG CUGCAUAUAA AAUUCUUGGC UCAUACUUUU UCCCCAUAAA UUUCUAUGAG
AAAGUCUAAU GAUAACUGAU UUUCUUUAUU UUGUAACUUA GUCUUUUUGC UUAGAGGCUC
UCUGAGGAUG GGAGGGGGUU CUUCCUCCCA UCCCUAGGAA UUUUUCUUUU UUUUAAAUUC
CUAAUCACUA GACCACCAGG AAGAUUGUUU GUUUUGUUUU GUUUUUAUUC UUCAGGGACC
CCAUUUAUAC AUACGUUAAA UAAAUACUGU UUGCCAAUGU AUCAACCAUU UUGCUUCUUA
UUUAUUUUUG UUCCUUUGGU UCUUUUUCAU GGCUUUGCUU UGGUGCUCCU UAGAUUUUCA
GUCAGAUGUA UUUGUCCUUG GGUACCUUGU AAUCAGUAUU ACCUUUUCUU CUGUCGCUUU
GUUUUCUGUU CGUUUUGAAA UUACUUGUUU CCUGGUCUGG CAAUAACAGU UGAGAUAUGA
GGAGUUUGAG CUGCCAUCUG UCUAUGUAUC UUGCUUUAAG ACUGCACUCU UCUAUUGAUA
UCACUGGCCU UGAUUUUGUG AUUUCUUUAU UUCUUCAGGA CCACCCUUCA UUUUCUACUG
UUUGCUUCCU UUUUUUUUGA GAUGGAGUCU CACUCUGUCA CUCAGGCUGG AGUGCAGUGA
UCUUGGCUCA UUGCAACCUC UGCCUCCCGG GUUCCAGCAA UUCUCCUGCC UCAGCCUCCC
AAGUAUCUGG GACUACAGGU GUGCACCACC AUGCCCGGCU AAGUUUUGUA UUUUUAAUAG
AGACGGGGUU UUGCCACAUU GGCAGGCUGG UCUCAAACUC CUGAUGUCAA GUGAUCCACC
CACCCCACCC ACCUCUGCAU CCCAAAGUGC UGGGAUUACA GGAAUGAGCU GCCGUGCCCA
GCCUCCCCCC UACCCCCCUU UUUUUCUUUC GAGACAGAGA UUAUAGGUGU GAGCCACUGG
ACCCAGCCUG UUUUUAUUCC UUUUACCAAA UCUCCAAGGA AUAUCUUCCC UUCCAAGUGC
GAAUGUAACC UUAAGUCAGU UAACCUCUUU GUGAUUACUU UUCUUAUCUG CAAAGUGACU
UAAUGAUCUU AAGUACUUUU UUUUUUUGAG ACAGGGUCUC ACUGUCACCC UGGCUGGAGU
GCAGUGGCAC GAUCUCUGAU CUCCACUCAC UGCAAUCUCC UCUUCCCUGG UUCAAGCGGC
CCUCCCACCU UAGCCUUCUG GGUAGCUGGG ACUACAGAUG UGAACCACCA CGCCCAGCUA
AUUUUUGUAC UUUUUGUAGA GAUGGGGUUU UGCCAUGUUG CCCAGGCUGG GAUUAUUAAG
UACUUUUUAU CAUACAGCAA GAUUGACAUU UUAUAUUGGA AUACAUUUGU CUCUAUAUAA
CGGAGAUUAA CAGGAAAAUG ACAAGCCUGG GUGCGGUGGC UCAUGCCUGU AAUCCCAGCA
CUUUGGGAGG CUGAGGUGGG AGGAUCACUU GAGGUCAGGA GUUCGAGACC AGUUUUGCCA
AGAUGAUGAA AGCCCAUGUC UACUAAAAAU ACAAAAAUUA GCCCAGCUUG AUGGUGGGCG
CCUAUAAUCC CAGCUAUUUG AGAGACUGAG GCAGGAGAAU CACUUGAACC UGGGCAGCAG
AGGUUGCAGU GAGCCGAGAU CAUGCCACUG CACUCCAGCC UGGGUGGCAU AGCGAGACUC
UUGUCUCAAG AGAAAACAAA AGAAAACAAA AAAAAAACAG GAAAAUGACA AAAAGUAAUA
UUACAACUCA GUGAAUUUUA UAACAAACUU UUUUGGAAUU CAUUGACUAA UACUAUACCA
AAUCCAAAAU ACUCUCUAGU AUACCAAAUC CAACUCUACC CUAUAGUAUA AAUUGGAUUC
UAUUUGGACU UGUCUCACUA AUCCCUCAUA CAGUGUGUUU UAUUUUUUAU UGAAGUAAAA
AAAUUUGUCA UUUUAACCAU UUUUAAGUAU AUAGUUCAGU AAUAUUAAGU AUGUUCAUGU
UGUUGCGCAA UAGAUCUUCG GAAGUUUUUC GUCUUGCAAC CUGAAACUCU ACCCAUUAGC
AAAUUCCCAU UUCUCCUUAC ACUUAGCCCU UGGUAAUCAU CAUUCUUUUU UUUUUUUUUU
UGAGAUGGAG UUUUACUCUU GUUGCCCAGG CUGGAGUGCA AUGGUGCAAU CUCGACUCAC
CACAACCUCC GCCUCCCAGG UUCAAGCAAU UCUACCUCAG CCUCCCGAGU AGCUGGGAUU
ACAGUCAUGC ACCACCACGC CCGGCUAAUU UUGUAUUUUU AGUAGAGAAG GGGUUUCUCC
AUGUUGAGGC UGGUCUCGAA CUCCUGACCU CAGGUGAUCU GCCCACCUCG GCCUCCCAAA
GUGCUGGGAU UACAGGCGUG AGCCACUGCG CCUGGCCCAU UCUUUCUAAU UCUAUAAAUU
UGACUACUUA GUUACCUUAC AUAAAUAAAU UCUUAUAGUU AGUGUUAUUU UUGCUUCCAU
GCCUUUUUUG UUGUUGUUCA UGCUCUUACU UGGAAUGCGU UCUAUUUUGU CUACCUAUGC
ACAUCCUGUU GGGUUUUUUU UUUUUUUGGG GGUUUUUUUU GUUUUUUUUU GUUUUUUUUU
CCCAGACAAG GUCUCAAUUU GUUACCCAGG CUGGAGUGCA GCGGCGCCAU CUCCACUCAC
UGCAUCCUCA ACUUCCUGGG CCCAGGUGAU CCUCUCGCCU CAGCCCCUGC AGGUAGCUGG
GACUAUAGGC AUGUGCCACC AUGCCCAGCU AAAUUUGGUU UUUUUGUUUG UUUGUUUUUG
AGACAGAGUC UCACUCUGUC ACCCAGGCUG GAGUGCAGUG GCACAAUCUC AGCUCACUGC
AAUCUCUGCC GCCCGGGUUC AAGUGAUUCU CCUGCCUCAG CCUCCCAAGC AGCUGGGAUU
ACAGGUGACU GCCACCACGC CAGCUAAGUU UUGUAGUUUU AGUAGAGAUG GGGUUUCACC
UUGUUGGCCA UGCUGGUCUC GAACUCCUGA CCUCGUGAUC UGCCUGCUUC UGCCUCCCAA
AGUGCUGGAA UUACAGGCAU GAGCCACCAC GCCCGGCCAG AAUUUUUGUA UUUUUAGUAG
ACACAAGGUU CUUACCCUGU UGCCUAGGCU GGUCUGGAAG UCCUGGACUC AAGCAAUUCA
CCUGCCUUGG CCUCCCAAAA UGCUGGGAUU ACAAGCCACC AUGCCCGGCC UAAAUCCUGU
UGUUUUGUUU UGUUUUAUUU UGUUUUGUUU UGUUUUGUUU GUUUUUUGAG ACAGAGUCUC
GCUAUGUCUC UCAGGCUGUA GUGCAGUGGC GCGAUCUUGG CUCACUGCCA CCUCUGCCUC
CCAGGUUCAA GUGAUUCUCC UGCCUCAGCC UCCCAAGUAG CUGGGAUUAC AGGCAUGUGC
UACUAUGUCC GGCUAAUUUU UGUAUUUUUA GUAGAGACAG GGUUUCACCA UGUUGGCCAG
GCUGGUCUCG AACUCCUGAC CUCGUGAUCC ACCCACCUCG GCCACCCAAA GUGCUGGGAU
UACAGGCGUG AGUGGUUUUU AUUUCUUAGG CCGGUUUCCU CCAUAUGAUC UUGCAGUAGA
CAUUAAUUUC UUUCCUUUUU AAUUAAAAUA CUGUUUGUAU UUCACAUUUU GAUGUUUGUU
AAGAUUUGUU UUAUAUUGUU UUUUGUUUUG UCUUGUGUGA UAGUCUUAAA UCCCUAGUUA
GAUAAUAACU GGAGAGUACC AUGUUUCUAU AUAUCUCUCA GUGACUUGCA CAGUGCUAGC
AGAUAGUGCU AAAAAAUUAU UUAUUAUUAU UAUUAUUUUG UUAUUGUUGU UGUUGUUGUU
AGACAGGGUC UUCCUCUGUC ACCCAGGCUA GAGGGCAAUG GGAUGAUCAU AGCUUACUGC
AGOCUCCAAC AACUGGGCUC AUGUAAUUCU CCUGCCUCAG CUUCCCAAGU AGCUGGGAUU
ACAGGCAUGA GCCACCAUGU CUGGACAAAA AUAUUUCCAG GUGCAGUGGC UCAUGCCUGU
AAUUCCCACA CUUGGGAGGC CGAGCGAGGC UGGAGGAUCA CUUGAGCCUA GGAGUUCAAG
ACCAGCUUGG CUAAGAUGGC GAGACCCCGU CCCUACAAAA AAUUUUAAAA ACUAGCCAGG
CAUGGUGGCA UGCACCUAUA UUCCCAACUA CUCAGUGGGC UGAGGUGGGA GGGUCAUUUG
AACACAGGAA UUUGAGGGGA GAAAAAAAGA AGAGAGAAAG AGAAGUGAAG GAAGGAAGAA
AGGAAGGAGG GAGGGAGAGA AGAAAGAAAC GAAAGAAAGG AAAAGAAAAG GAAGGAAAGA
AAAUUGGUAC CAGGAAAGCA GGAAAGGGAA AUGGAAGUAA AAAAAUAAUA AUAAUAAUAA
AAUGAAAAUU GGUUAGUCAC UAUUAACAAU UUGUAUCCUU AUAAUCUGGA AACAUUAUAA
UUUCAAAAGA AAAAAUAUUC UUUGGAUCAU AGGUUCUGAG GUCAGAACAG CAUUCCCGUA
GUCUAGAUGA AGUCAAGUUU UAUCUGAUCU UAAUUGAAAU AAAUAUAGCU GGCCUUGAAC
AAAUCUACUC AUGGUAUGUG GAUAGGAAUU AAAUUGUAGG GGCAUUCACU UGAUGGCAUU
CAUUCUUAGA ACAUUUACCU AUGUCUAGCU UUUGGAGUAA AGUCACAUAA CCUCUAACCA
GGUAAGUUUC CUGUGGCUUU AUUUAGGAUU UUAAAUACUC AUUUUCAGUG UAAUUUUGUU
AUGUGUGGAU UAAGAUGACU CUUGGUACUA ACAUACAUUU UCUGAUUAAA CCUAUCUGAA
CAUGAGUUGU UUUUAUUUCU UACCCUUUCC AGAGCGAUGA UUCUGACAUU UGGGAUGAUA
CAGCACUGAU AAAAGCAUAU GAUAAAGCUG UGGCUUCAUU UAAGGUAUGA AAUGCUUGCU
UAGUCGUUUU CUUAUUUUCU CGUUAUUCAU UUGGAAAGGA AUUGAUAACA UACGAUAAAG
UGUUAAAGUA CAUGUUAUUC AGUUUUCAUU UUGAAGAUUA GAUGGUAGUA UGAGUUAGUU
AAAUCAGGUG AUAUCCUCCU UUAGAAGUUG AUAGCCUAUA UAUGUCAUCC UUUGUGGAGG
CAAUUUAAAU AAAAUUUAAA ACAUUUAUUC CUGGCUGGGU AUGGUGGCUC ACUCCUGUAA
UCCCAGCACU UUGAGAGGCU GAGGCGGGUG GAUCACCUGA GGUCAGGAGU UUGAGACCAG
CCUGGCCAAC AUGGUGAAAC CCCGUCUUUA CUAAAAAUAC AAAAAUUAGC CAAGCAUGGU
GGCACGUGCC UGUAAUCCCA GCUGCUUGGG ACACUGAGGC AGGAGAAUUG CUUGAACCUG
GGGGGCAGAG GUUGCAAUGA UUGCACCACU GCACUCCAGC CUGGGCGAUA GAGUGAGACU
CCAUCUCAGA AAACGAACAA ACAAUGUAUU CCUUUUAGUA UUUUUACAUU GUAUCAAACU
AUGGAAGUCC UCUAAUUGAG AUUAAUAAGA AAAAGACAAU CUGAAUUAUA AUUUUAAACA
UUUAACAAGC AUGUAGUAAA AUAAUGAUGA AGAUAAAUAG CAUUAGUACA GCAAUUAAUA
UUUGUAGCAU GCUGACAGUG CUCUGUGUGC GUUUCAUAUA UUAAAUUACU CUAAUCAUCC
CAAAUCCUGU AAGUUGGGUA UCAAUUCAAG UGUUCCUAUU GGGUAGGAAU AUACAGUUCU
UUUAGGAAAU GUAGUAUGGU UCUGUGUCUC AAACAGGACA CUUACACAGU UGGCCAACAU
CAUCACCUUC UCCAUUCUCU GAGAUGUUUA GUCUUACUGA GCACUAAAUA UGGGUCAUCA
AUAGUCCAGA CUACCUUGAG CAAACAAUAG UCCAGACUAC CUUGAGCAAA CAGAGCAUAU
ACUCAUACAG UGUAUAAAGA GCACCAAGCA UACAGAUUUC AUGUCUUUCU CAUAGUUACU
CUUGUAACAU GAGCUAAAGA UCAGACCUCU AUGUCACCUU UGUAACUGAU UUCUAGAUUU
UUUUUUUUUU UUGAGAUGGG GUCUUGCCCU GUCACCCAGG CUGGAGUGUA GUGGCGUGAU
CAUGCCUCAU UGGAGCCUUC AACUCAUGAG CUCAAACAAU CCUCCUACCU CAGCUUCCUG
AGUAGUUGGG ACCACAGGUG UGUGCCACCA CACCCAGCUC AUUUUUGUAU UCUUUGUAGA
GAUGCAGUCU CACCCUGUUG CCCAGGCUGG CCUGGAACUC CUGAGCUCAA AAGAUCCCUC
CGCCUUGACC UUCCAAAGUG CUGGGAUUAC AAGCAUGAAC CACUGCACCC GGCCUAGAUU
UUUAAAUGUG CUUUCCAGUA UACACUGAAA CUAGAAGUCG ACUAAAGAAU UACCAAGAGA
AUUCUAUAAA AUAGAGAUUG AAAUGGGGCU CGAUGUGGGA UGGGUUGGUG AUAUUGCAGG
GAGAAGUAAU CUGAGUAAAG GAGGAAAAGA ACUGAUUUGG GAAAACGAUA GUUUUAGUAG
UGAGUUUGAG UAUGAAUUAA GUUGAGAUUG AAUUUGAAUU AAGUUGAGGU UGAAUAUGAA
UUAAGUUGAG GUUGAGUUUG AGGUAUGAAU UAAGAUGUGA AAUUGAUCAU UGGAAAUGUU
AGAUUGAGAA AAGUCACAGC UGGAUUAAUA GCUUCAGAAG UGUGUUUGCA GACAGUUGCA
ACUAAAGUAA UAAGAAUAGA UGGCCUUGGC CGGGCGUGGU GGCUCACGCC UGUAAUCCCA
GUACUUUGGG AGGCUGAGGC GAGCAAAUCA CGAGGUCAGG AGUUCAAGAC CAGCCUGGCC
CACAUGGUGA AACCCCGUCU UUAUUAAAAA UACAAAAAUU AGCUGUGCAC AGUGGUGCAC
GCCUGUAAUC CCAGCUACUC GGGAGGCUGA GACAGGAGAA UCGCUU3AAC CUGGGAGGUG
GAGGUUGCAG UGAGCUGAGA UCAGUGUGAC UGCACUCCAG CCCGGUGACA GAGUGAGACU
CUGUGUAAAA AAAUAAAAUA AAUAAAAUAA UGGCCGUAAG CAAGUAAAGA AGGAUGGCCA
GCUCUUAUUG GGAAUGCCUA AAUCUAAGGC UUGAUCAGAA GUAAUGAAAC CGUUGGGGCC
CUACAUUGCU AUGACAUCCA AAGGGCCAUG AAUAUCAGGA AGAAAGAUAA UUAACAGGGU
CUAAUGUUAC AGAGAGGUUG AGAGCAAGGA GAUUUGAUUA AAAGGGUCUU UAGAGCUGAU
GUCAGGUGUA UGAUGCCUUU AAGAGCAGUU UUUAUAGUGC AGGGGGUGGU CAAAAGAGAA
AAUAGGUGCU UUCUGAGGUG ACGGAGCCUU GAGACUAGCU UAUAGUAGUA ACUGGGUUAU
GUCGUGACUU UUAUUCUGUG CACCACCCUG UAACAUGUAC AUUUUUAUUC CUAUUUUCGU
AGCAUGCUCU AAAGAAUGGU GACAUUUGUG AAACUUCGGG UAAACCAAAA ACCACACCUA
AAAGAAAACC UGCUAAGAAG AAUAAAAGCC AAAAGAAGAA UACUGCAGCU UCCUUACAAC
AGGUUAUUUU AAAAUGUUGA GAUUUAACUU CAAAGGAUGU CUCAUUAGUC CUUAUUUAAU
AGUGUAAAAU GUCUUUAACU UAAGUGAUUA GUACAGUGUU UCUAUUGACA UAUACUUAUA
CAACUUCAAA AACAACUAUU AAAUUUUCUG UUAUUUAGGA ACAUGCAUAU UAGUCAUGAA
AGUAUAAAGA AUUAGAUGGG AAUGAUAAAU GCUAAAAUCA GGACAUGUGU UCCAUUUGUG
AAUGGAAGGC AGGGAGAAGG UGCCGUUUGG AAGGAGUACC CAAGAGCCGU AAGCUGAAUU
GGCAGUGUUU UACAUCUUAA GCUGAGAGAU AGAUUUUUUU UUCCCCUUUU UCUUUAAAAA
CUCUAAAACU GUUAAUUCCA AGGAACCCAG AAGUCUAGGU AGAUUAUUUC UGCUAGUUAA
AAGCAGUAGU CCUGAAAGCU GAAUAUUUUG GUGUCUUUUG AGCCAACUUU AGUUUCAUCA
UUACCAAGGG GGAAGAGAGC UAACAGUUGA UGAGCACUUG CUCUAGGCCA GUCCAGAGUG
CUGGGCACCA UACGCAUUUU AUCUCCCUCC CGCUAUUCAC AACAAAUAUG GGAGGUAGUU
UAUAUUAUAG CCAUCUAAUA AGAUGGGGAA ACUAAGACUC AAAGAGAUUC AGAAACUUGU
CCAUGAUUAU AAAUGUAAGA GAGUUGGAAU UCAGAUUUAU GUAUUUAGAC CCCAAGCCUU
UCUCAUUACA UCAUUUUGCC UUCCAAAUCU CUACCCUCUA UCCUUCACCU CCCCACUGAU
CAAAACGAGA UGAUAGUUUG CCCUCUUCAA AAGAAAUGUG UGCAUGUAUA UAUCUUUGAU
UUCUUUUGUA GUGGAAAGUU GGGGACAAAU GUUCUGCCAU UUGGUCAGAA GACGGUUGCA
UUUACCCAGC UACCAUUGCU UCAAUUGAUU UUAAGAGAGA AACCUGUGUU GUGGUUUACA
CUGGAUAUGG AAAUAGAGAG GAGCAAAAUC UGUCCGAUCU ACUUUCCCCA AUCUGUGAAG
UAGCUAAUAA UAUAGAACAA AAUGCUCAAG AGGUAAGGAU ACAAAAAAAA AAAAAUUCAA
UUUCUGGAAG CAGAGACUAG AUGAGAAACU GUUAAACAGU AUACACAGUU GUCAGUUUGA
UCCACCGAGG CAUUAAUUUU UUCUUAAUCA CACCCUUAUA ACAAAAACCU GCAUAUUUUU
UCUUUUUAAA GAAUGAAAAU GAAAGCCAAG UUUCAACAGA UGAAAGUGAG AACUCCAGGU
CUCCUGGAAA UAAAUCAGAU AACAUCAAGC CCAAAUCUGC UCCAUGGAAC UCUUUUCUCC
CUCCACCACC CCCCAUGCCA GGGCCAAGAC UGGGACCAGG AAAGGUAAAC CUUCUAUGAA
AGUUUUCCAG AAAAUAGUUA AUGUCGGGAC AUUUAACCUC UCUGUUAACU AAUUUGUAGC
UCUCCCAUGA AACUUUUGUA GCUUAAAUAC ACAAGAAUUU UUUGAAAAGG AAAUAAGAUA
AUGAUGCAAA AUAbUUAAUU UUUUAAAAAA AUGUUAGACA CUGCAGUGGA UGCAACAAAA
UACUUUAUAU GAAAGAUUUA UCCAGUUAAC UUUUGUGGAG UAUUAGGUAU UAGACUAAUA
AUUAGCACAC UUACUUAAGU UAGAAAGUAU AAUAAUGCGC CGGACGCGGU AGCUCACGCC
UGUAAUCCCA GCACUUUGGG AGGCCAAGGU GGGCGGAUCA CAAGGUCAGG AGAUCGAGAC
CAUCCUGGCU AACACUGUGA AACCCCAUCU CUACUGAAAA UACAAAAAAA UUUGCCGGGC
GUGAUGGCGG GCACCUGUAG UCCCAGCUAC UCGGGAGGCU GAGGCAGGAG GAUGGUGUGA
ACCCCGGAGG CAGAGCUUGC AGUGAGUCAA GAUCGUGCCA CUGCACUCCA ACCUGGGCGA
CAGAAUGAGA CUCCAUCUCA AACAAAAAAA CAAAACAAAA CAAAAAAAAG UGUAAUAAUA
AUUUAUCAUU AGOUGGAUGA UAUGCUGUUG UUUCCCAUGU CACCUGUAUA AGAUAUGUAA
AAUAAGAACA CAUUAUUUAC AUCUAAUAUA GAUAAAAUCC UGAGGCGCUC UCAGAUUGUU
UUGUAGAGUU CAAAUGUAAA UAUUGUUUUC AUUUAUGGUC CUUUUGGUUA UAAGUAACAG
AAAUCAACUC UAAAAAGAUU UUUAUUAUAG GUUAGAUUAU GUCAUGGAAC CUUAAGGCUU
GUCCCUUUCU AGUUCUUUUG UGUAAAGCGG UGAUUUCUUC CAUGGAGGGA AUGGUAUUUA
GGCAAUUUUU UUUUUUUUUU CGAGAUGGAG UCUUGCUCUG UCGCUCAGGC UGGAGUGCAG
UGGCACCAUU UCAGCUCACU GCAACUUCCA CCUCCUGGGU UCAAGUGAUU CUCCUGCUUC
AGCCUCCCAA GUAGCUGAGA UUACAGGCAC CCGCCACCAC ACCCGGCUUA UUUUGUAUUU
UUAGUAGAGA UGGGGUUUCA CCAUGUUGGC CAGGCUGGUC UUGAACUCCU GACCUCAAGU
GAUCUCCCCA CCUUGGCCUU CCAAAGUGCU AGGAUUACAG GCGCCUAGCC UAGGCAGUCA
UUUUCAAAAA ACAAGCAUGA CUCACCAAAA GUUUUAAGAU UUUCUGUGAU AAUGUUCUUA
UUGAGGCUUA CAUUAUAUUA CAGUUUCUUG AAUCUAAAAU GAUGUACCCU CUUAGAAUAU
AUACAUCAUG CUUCAUUGGU CUCAGGGGGC UGAUUUUUAU AAGGAGAGAU UUGCUAGUUU
UCACAAUAUG UCCUCUAAGU UGGCAUGUAU AGCUAAACAG GCUUUCAUAA AAAUAUACAA
UUUAGUUAAU GAAAUUUGGG AUAUAGUCUU UUAUGAUUGA AAUAAUUUUG CUAAAUAGAC
UGUCUCUGAU UOAUUAGGUA AUCACCACUC UUAUUUUGUU UUACUUCCUU AAUGUCUACA
UAGAAAGGAA AUGAGAAAAA UCCAGAGGUU GUCAUUUGAC UUAUGAGUCU GUUUGACUUC
AGGAUUUGGU ACAUGAAAUU UCACUUAAUC UUUUUGAUAU GUAUAAAACA AAUAUUCUGG
GUAAUUAUUU UUAUCCUUUU GGUUUUGAGU CCUUUUUAUU CCUAUCAUAU UGAAAUUGGU
AAGUUAAUUU UCCUUUGAAA UAUUCCUUAU AGCCAGGUCU AAAAUUCAAU GGCCCACCAC
CGCCACCGCC ACCACCACCA CCCCACUUAC UAUCAUGCUG GCUGCCUCCA UUUCCUUCUG
GACCACCAGU AAGUAAAAAA GAGUAUAGGU UAGAUUUUGC UUUCACAUAC AAUUUGAUAA
UUAGCAGAAU AGAGGAUUGU AAAAUGUCAU UGUAGAACAU CCCUUGGGCC AGAUUCUAAU
GGGUAGAAAU UUGAACUAAA CCUCUGGGUU UUGUUUGUUU UUAAUGCCUU UCUGUUACCC
AGAUGCAGUG CUCUUGUAGU CCCAAGUCUA AGCUCUAGGU UGCCUUCUUU CCUGGCAGAA
GUUGGUGUCU AUGCCAUAAG GAGGUAGUUC CUGUUAGAAG GGAUUUAAUU AUACCUUAUA
UAAGGAAUUA GUGUUUGCCC UUCUAGGUAU AGUUGGAUGU UAGCUUCUGA UGUAAACUGG
AUUUCUUUUU CUUUCUCUCU CUUUUUUUUU UUUUGUUUUG GAGGCAGAGU UUUGCCCUUG
UACCCCAGGC UGGAGUGCAG UGGUGUGAUC UCAGCUCACA GCAACCUCCG CCUCCUGGGU
UCAAGCAAUU CUGCCUCGGC CUCCCAAGUA GCUGGGAUUA CAGGCGACUG CCACCACACC
CGGCUAAUUU UUGUUUUAUU AGUAGAGAUG GGGUUUCACC AUGUUGGCCA GACUGAUCUU
GAACUCCUGA CCUCAGGUGA UCCACCCGCC UUGGCCUCCC AAAGCGCUGG GAUUACAGGC
GUGAGCUGCC GCACCCAGCU GUAAACUGGA UUUCUAAUGG UAGAUUUUUA GGUAUUAACA
AUAGAUAAAA AGAUACUUUU UGGCAUACUG UGUAUUGGGA UGGGGUUAGA ACAGGUGUUC
UACCCAAGAC AUUUACUUAA AAUCGCCCUC GAAAUGCUAU GUGAGCUGUG UGUGUGUGUG
UGUGUGUGUG UGUAUUAAGG AAAAGCAUGA AAGUAUUUAU GCUUGAUUUU UUUUUUUUAC
UCAUAGCUUC AUAGUGGAAC AGAUACAUAG UCUAAAUCAA AAUGUUUAAA CUUUUUAUGU
CACUUGCUGU CUUUUCGUCC UCGUUAAAUU UAAUUUUGUU GGUCUUUUGU UGUUAUUGGU
UGGUUUUCUC CAAAUGCUAG CUAUGUUAAG AAAUUUAAGG CCAGGUACAG UGGCUCAUGC
CUGUAAUCCC GGCAUUUUAG AAGGCUGAGG CAGGAGGAUC ACUUGAGCUC AGGAGUUUGA
GACCAGUCUG GGCAACAUAG CAAGACCUCG UCUUUGUUUA GGGGAAAAAA AAGAAAUUUA
AGUAGGAGAU UAUAUAAGCA AAAAUACAAU UAAUUUCCAG CAUUCACUAU AUAAUAUAAA
UCUCCAGACU UUACUUUUUU GUUUACUGGA UAUAAACAAU AUCUUUUUCU GUCUCCAGAU
AAUUCCCCCA CCACCUCCCA UAUGUCCAGA UUCUCUUGAU GAUGCUGAUG CUUUGGGAAG
UAUGUUAAUU UCAUGGUACA UGAGUGGCUA UCAUACUGGC UAUUAUAUGG UAAGUAAUCA
CUCAGCAUCU UUUCCUGACA AUUUUUUUGU AGUUAUGUGA CUUUGUUUUG UAAAUUUAUA
AAAUACUACU UGCUUCUCUC UUUAUAUUAC UAAAAAAUAA AAAUAAAAAA AUACAACUGU
CUGAGGCUUA AAUUACUCUU GCAUUGUCCC UAAGUAUAAU UUUAGUUAAU UUUAAAAAGC
UUUCAUGCUA UUGUUAGAUU AUUUUGAUUA UACACUUUUG AAUUGAAAUU AUACUUUUUC
UAAAUAAUGU UUUAAUCUCU GAUUUGAAAU UGAUUGUAGG GAAUGGAAAA GAUGGGAUAA
UUUUUCAUAA AUGAAAAAUG AAAUUCUUUU UUUUUUUUUU UUUUUUUUGA GACGGAGUCU
UGCUCUGUUG CCCAGGCUGG AGUGCAAUGG CGUGAUCUUG GCUCACAGCA AGCUCUGCCU
CCUGGAUUCA CGCCAUUCUC CUGCCUCAGC CUCAGAGGUA GCUGGGACUA CAGGUGCCUG
CCACCACGCC UGUCUAAUUU UUUGUAUUUU UUUGUAAAGA CAGGGUUUCA CUGUGUUAGC
CAGGAUGGUC UCAAUCUCGU GACCCCGUGA UCCACCCGCC UCGGCCUUCC AAGAGAAAUG
AAAUUUUUUU AAUGCACAAA GAUCUGGGGU AAUGUGUACC ACAUUGAACC UUGGGGAGUA
UGGCUUCAAA CUUGUCACUU UAUACGUUAG UCUCCUACGG ACAUGUUCUA UUGUAUUUUA
GUCAGAACAU UUAAAAUUAU UUUAUUUUAU UUUAUUUUUU UUUUUUUUUU GAGACGGAGU
CUCGCUCUGU CACCCAGGCU GGAGUACAGU GGCGCAGUCU CGGCUCACUG CAAGCUCCGC
CUCCCGGGUU CACGCCAUUC UCCUGCCUCA GCCUCUCCGA GUAGCUGGGA CUACAGGCGC
CCGCCACCAC GCCCGGCUAA UUUUUUUUUA UUUUUAGUAG AGACGGGGUU UCACCGUGGU
CUCGAUCUCC UGACCUCGUG AUCCACCCGC CUCGGCCUCC CAAAGUGCUG GGAUUACAAG
CGUGAGCCAC CGCGCCCGGC CUAAAAUUAU UUUUAAAAGU AAGCUCUUGU GCCCUGCUAA
AAUUAUGAUG UGAUAUUGUA GGCACUUGUA UUUUUAGUAA AUUAAUAUAG AAGAAACAAC
UGACUUAAAG GUGUAUGUUU UUAAAUGUAU CAUCUGUGUG UGCCCCCAUU AAUAUUCUUA
UUUAAAAGUU AAGGCCAGAC AUGGUGGCUU ACAACUGUAA UCCCAACAGU UUGUGAGGCC
GAGGCAGGCA GAUCACUUGA GGUCAGGAGU UUGAGACCAG CCUGGCCAAC AUGAUGAAAC
CUUGUCUCUA CUAAAAAUAC CAAAAAAAAU UUAGCCAGGC AUGGUGGCAC AUGCCUGUAA
UCCGAGCUAC UUGGGAGGCU GUGGCAGGAA AAUUGCUUUA AUCUGGGAGG CAGAGGUUGC
AGUGAGUUGA GAUUGUGCCA CUGCACUCCA CCCUUGGUGA CAGAGUGAGA UUCCAUCUCA
AAAAAAGAAA AAGGCCUGGC ACGGUGGCUC ACACCUAUAA UCCCAGUACU UUGGGAGGUA
GAGGCAGGUG GAUCACUUGA GGUUAGGAGU UCAGGACCAG CCUGGCCAAC AUGGUGACUA
CUCCAUUUCU ACUAAAUACA CAAAACUUAG CCCAGUGGCG GGCAGUUGUA AUCCCAGCUA
CUUGAGAGGU UGAGGCAGGA GAAUCACUUG AACCUGGGAG GCAGAGGUUG CAGUGAGCCG
AGAUCACACC GCUGCACUCU AGCCUGGCCA ACAGAGUGAG AAUUUGCGGA GGGAAAAAAA
AGUCACGCUU CAGUUGUUGU AGUAUAACCU UGGUAUAUUG UAUGUAUCAU GAAUUCCUCA
UUUUAAUGAC CAAAAAGUAA UAAAUCAACA GCUUGUAAUU UGUUUUGAGA UCAGUUAUCU
GACUGUAACA CUGUAGGCUU UUGUGUUUUU UAAAUUAUGA AAUAUUUGAA AAAAAUACAU
AAUGUAUAUA UAAAGUAUUG GUAUAAUUUA UGUUCUAAAU AACUUUCUUG AGAAAUAAUU
CACAUGGUGU GCAGUUUACC UUUGAAAGUA UACAAGUUGG CUGGGCACAA UGGCUCACGC
CUGUAAUCCC AGCACUUUGG GAGGCCAGGG CAGGUGGAUC ACGAGGUCAG GAGAUCGAGA
CCAUCCUGGC UAACAUGGUG AAACCCCGUC UCUACUAAAA GUACAAAAAC AAAUUAGCCG
GGCAUGUUGG CGGGCACCUU UUGUCCCAGC UGCUCGGGAG GCUGAGGCAG GAGAGUGGCG
UGAACCCAGG AGGUGGAGCU UGCAGUGAGC CGAGAUUGUG CCAGUGCACU CCAGCCUGGG
CGACAGAGCG AGACUCUGUC UCAAAAAAUA AAAUAAAAAA GAAAGUAUAC AAGUCAGUGG
UUUUGGUUUU CAGUUAUGCA ACCAUCACUA CAAUUUAAGA ACAUUUUCAU CACCCCAAAA
AGAAACCCUG UUACCUUCAU UUUCCCCAGC CCUAGGCAGU CAGUACACUU UCUGUCUCUA
UGAAUUUGUC UAUUUUAGAU AUUAUAUAUA AACGGAAUUA UACGAUAUGU GGUCUUUUGU
GUCUGGCUUC UUUCACUUAG CAUGCUAUUU UCAAGAUUCA UCCAUGCUGU AGAAUGCACC
AGUACUGCAU UCCUUCUUAU UGCUGAAUAU UCUGUUGUUU GGUUAUAUCA CAUUUUAUCC
AUUCAUCAGU UCAUGGACAU UUAGGUUGUU UUUAUUUUUG GGCUAUAAUG AAUAAUGUUG
CUAUGAACAU UCGUUUGUGU UCUUUUUGUU UUUUUGGUUU UUUGGGUUUU UUUUGUUUUG
UUUUUGUUUU UGAGACAGUC UUGCUCUGUC UCCUAAGCUG GAGUGCAGUG GCAUGAUCUU
GGCUUACUGC AAGCUCUGCC UCCCGGGUUC ACACCAUUCU CCUGCCUCAG CCCGACAAGU
AGCUGGGACU ACAGGCGUGU GCCACCAUGC ACGGCUAAUU UUUUGUAUUU UUAGUAGAGA
UGGGGUUUCA CCGUGUUAGC CAGGAUGGUC UCGAUCUCCU GACCUCGUGA UCUGCCUGCC
UAGGCCUCCC AAAGUGCUGG GAUUACAGGC GUGAGCCACU GCACCUGGCC UUAAGUGUUU
UUAAUACGUC AUUGCCUUAA GCUAACAAUU CUUAACCUUU GUUCUACUGA AGCCACGUGG
UUGAGAUAGG CUCUGAGUCU AGCUUUUAAC CUCUAUCUUU UUGUCUUAGA AAUCUAAGCA
GAAUGCAAAU GACUAAGAAU AAUGUUGUUG AAAUAACAUA AAAUAGGUUA UAACUUUGAU
ACUCAUUAGU AACAAAUCUU UCAAUACAUC UUACGGUCUG UUAGGUGUAG AUUAGUAAUG
AAGUGGGAAG CCACUGCAAG CUAGUAUACA UGUAGGGAAA GAUAGAAAGC AUUGAAGCCA
GAAGAGAGAC AGAGGACAUU UGGGCUAGAU CUGACAAGAA AAACAAAUGU UUUAGUAUUA
AUUUUUGACU UUAAAUUUUU UUUUUAUUUA GUGAAUACUG GUGUUUAAUG GUCUCAUUUU
AAUAAGUAUG ACACAGGUAG UUUAAGGUCA UAUAUUUUAU UUGAUGAAAA UAAGGUAUAG
GCCGGGCACG GUGGCUCACA CCUGUAAUCC CAGCACUUUG GGAGGCCGAG GCAGGCGGAU
CACCUGAGGU CGGGAGUUAG AGACUAGCCU CAACAUGGAG AAACCCCGUC UCUACUAAAA
AAAAUACAAA AUUAGGCGGG CGUGGUGGUG CAUGCCUGUA AUCCCAGCUA CUCAGGAGGC
UGAGGCAGGA GAAUUGCUUG AACCUGGGAG GUGGAGGUUG CGGUGAGCCG AGAUCACCUC
AUUGCACUCC AGCCUGGGCA ACAAGAGCAA AACUCCAUCU CAAAAAAAAA AAAAUAAGGU
AUAAGCGGGC UCAGGAACAU CAUUGGACAU ACUGAAAGAA GAAAAAUCAG CUGGGCGCAG
UGGCUCACGC CGGUAAUCCC AACACUUUGG GAGGCCAAGG CAGGCGAAUC ACCUGAAGUC
GGGAGUUCCA GAUCAGCCUG ACCAACAUGG AGAAACCCUG UCUCUACUAA AAAUACAAAA
CUAGCCGGGC AUGGUGGCGC AUGCCUGUAA UCCCAGCUAC UUGGGAGGCU GAGGCAGGAG
AAUUGCUUGA ACCGAGAAGG CGGAGGUUGC GGUGAGCCAA GAUUGCACCA UUGCACUCCA
GCCUGGGCAA CAAGAGCGAA ACUCCGUCUC AAAAAAAAAA GGAAGAAAAA UAUUUUUUUA
AAUUAAUUAG UUUAUUUAUU UUUOAAGAUG GAGUUUUGCC CUGUCACCCA GGCUGGGGUG
CAAUGGUGCA AUCUCGGCUC ACUGCAACCU CCGCCUCCUG GGUUCAAGUG AUUCUCCUGC
CUCAGCUUCC CGAGUAGCUG UGAUUACAGC CAUAUGCCAC CACGCCCAGC CAGUUUUGUG
UUUUGUUUUG UUUUUUGUUU UUUUUUUUUG AGAGGGUGUC UUGCUCUGUC CCCCAAGCUG
GAGUGCAGCG GCGCGAUCUU GGCUCACUGC AAGCUCUGCC UCCCAGGUUC ACACCAUUCU
CUUGCCUCAG CCUCCCGAGU AGCUGGGACU ACAGGUGCCC GCCACCACAC CCGGCUAAUU
UUUUUGUGUU UUUAGUAGAG AUGGGGUUUC ACUGUGUUAG CCAGGAUGGU CUCGAUCUCC
UGACCUUUUG AUCCACCCGC CUCAGCCUCC CCAAGUGCUG GGAUUAUAGG CGUGAGCCAC
UGUGCCCGGC CUAGUCUUGU AUUUUUAGUA GAGUCGGGAU UUCUCCAUGU UGGUCAGGCU
GUUCUCCAAA UCCGACCUCA GGUGAUCCGC CCGCCUUGGC CUCCAAAAGU GCAAGGCAAG
GCAUUACAGG CAUGAGCCAC UGUGACCGGC AAUGUUUUUA AAUUUUUUAC AUUUAAAUUU
UAUUUUUUAG AGACCAGGUC UCACUCUAUU GCUCAGGCUG GAGUGCAAGG GCACAUUCAC
AGCUCACUGC AGCCUUGACC UCCAGGGCUC AAGCAGUCCU CUCACCUCAG UUUCCCGAGU
AGCUGGGACU ACAGUGAUAA UGCCACUGCA CCUGGCUAAU UUUUAUUUUU AUUUAUUUAU
UUUUUUUUGA GACAGAGUCU UGCUCUGUCA CCCAGGCUGG AGUGCAGUGG UGUAAAUCUC
AGCUCACUGC AGCCUCCGCC UCCUGGGUUC AAGUGAUUCU CCUGCCUCAA CCUCCCAAGU
AGCUGGGAUU AGAGGUCCCC ACCACCAUGC CUGGCUAAUU UUUUGUACUU UCAGUAGAAA
CGGGGUUUUG CCAUGUUGGC CAGGCUGUUC UCGAACUCCU GAGCUCAGGU GAUCCAACU3
UCUCGGCCUC CCAAAGUGCU GGGAUUACAG GCGUGAGCCA CUGUGCCUAG CCUGAGCCAC
CACGCCGGCC UAAUUUUUAA AUUUUUUGUA GAGACAGGGU CUCAUUAUGU UGCCCAGGGU
GGUGUCAAGC UCCAGGUCUC AAGUGAUCCC CCUACCUCCG CCUCCCAAAG UUGUGGGAUU
GUAGGCAUGA GCCACUGCAA GAAAACCUUA ACUGCAGCCU AAUAAUUGUU UUCUUUGGGA
UAACUUUUAA AGUACAUUAA AAGACUAUCA ACUUAAUUUC UGAUCAUAUU UUGUUGAAUA
AAAUAAGUAA AAUGUCUUGU GAAACAAAAU GCUUUUUAAC AUCCAUAUAA AGCUAUCUAU
AUAUAGCUAU CUAUAUCUAU AUAGCUAUUU UUUUUAACUU CCUUUAUUUU CCUUACAGGG
UUUUAGACAA AAUCAAAAAG AAGGAAGGUG CUCACAUUCC UUAAAUUAAG GAGUAAGUCU
GCCAGCAUUA UGAAAGUGAA UCUUACUUUU GUAAAACUUU AUGGUUUGUG GAAAACAAAU
GUUUUUGAAC AUUUAAAAAG UUCAGAUGUU AGAAAGUUGA AAGGUUAAUG UAAAACAAUC
AAUAUUAAAG AAUUUUGAUG CCAAAACUAU UAGAUAAAAG GUUAAUCUAC AUCCCUACUA
GAAUUCUCAU ACUUAACUGG UUGGUUGUGU GGAAGAAACA UACUUUCACA AUAAAGAGCU
UUAGGAUAUG AUGCCAUUUU AUAUCACUAG UAGGCAGACC AGCAGACUUU UUUUUAUUGU
GAUAUGGGAU AACCUAGGCA UACUGCACUG UACACUCUGA CAUAUGAAGU GCUCUAGUCA
AGUUUAACUG GUGUCCACAG AGGACAUGGU UUAACUGGAA UUCGUCAAGC CUCUGGUUCU
AAUUUCUCAU UUGCAGGAAA UGCUGGCAUA GAGCAGCACU AAAUGACACC ACUAAAGAAA
CGAUCAGACA GAUCUGGAAU GUGAAGCGUU AUAGAAGAUA ACUGGCCUCA UUUCUUCAAA
AUAUCAAGUG UUGGGAAAGA AAAAAGGAAG UGGAAUGGGU AACUCUUCUU GAUUAAAAGU
UAUGUAAUAA CCAAAUGCAA UGUGAAAUAU UUUACUGGAC UCUAUUUUGA AAAACCAUCU
GUAAAAGACU GAGGUGGGGG UGGGAGGCCA GCACGGUGGU GAGGCAGUUG AGAAAAUUUG
AAUGUGGAUU AGAUUUUGAA UGAUAUUGGA UAAUUAUUGG UAAUUUUAUG AGCUGUGAGA
AGGGUGUUGU AGUUUAUAAA AGACUGUCUU AAUUUGCAUA CUUAAGCAUU UAGGAAUGAA
GUGUUAGAGU GUCUUAAAAU GUUUCAAAUG GUUUAACAAA AUGUAUGUGA GGCGUAUGUG
GCAAAAUGUU ACAGAAUCUA ACUGGUGGAC AUGGCUGUUC AUUGUACUGU UUUUUUCUAU
CUUCUAUAUG UUUAAAAGUA UAUAAUAAAA AUAUUUAAUU UUUUUUUAAA UUA
Homo sapiens SMN2 mRNA nucleic acid sequence
NCBI Ref. Seq.: NM_07411.3
(SEQ ID NO: 13)
CCACAAATGT GGGAGGGCGA TAACCACTCG TAGAAAGCGT GAGAAGTTAC TACAAGCGGT
CCTCCCGGCC ACCGTACTGT TCCGCTCCCA GAAGCCCCGG GCGGCGGAAG TCGTCACTCT
TAAGAAGGGA CGGGGCCCCA CGCTGCGCAC CCGCGGGTTT GCTATGGCGA TGAGCAGCGG
CGGCAGTGGT GGCGGCGTCC CGGAGCAGGA GGATTCCGTG CTGTTCCGGC GCGGCACAGG
CCAGAGCGAT GATTCTGACA TTTGGGATGA TACAGCACTG ATAAAAGCAT ATGATAAAGC
TGTGGCTTCA TTTAAGCATG CTCTAAAGAA TGGTGACATT TGTGAAACTT CGGGTAAACC
AAAAACCACA CCTAAAAGAA AACCTGCTAA GAAGAATAAA AGCCAAAAGA AGAATACTGC
AGCTTCCTTA CAACAGTGGA AAGTTGGGGA CAAATGTTCT GCCATTTGGT CAGAAGACGG
TTGCATTTAC CCAGCTACCA TTGCTTCAAT TGATTTTAAG AGAGAAACCT GTGTTGTGGT
TTACACTGGA TATGGAAATA GAGAGGAGCA AAATCTGTCC GATCTACTTT CCCCAATCTG
TGAAGTAGCT AATAATATAG AACAAAATGC TCAAGAGAAT GAAAATGAAA GCCAAGTTTC
AACAGATGAA AGTGAGAACT CCAGGTCTCC TGGAAATAAA TCAGATAACA TCAAGCCCAA
ATCTGCTCCA TGGAACTCTT TTCTCCCTCC ACCACCCCCC ATGCCAGGGC CAAGACTGGG
ACCAGGAAAG CCAGGTCTAA AATTCAATGG CCCACCACCG CCACCGCCAC CACCACCACC
CCACTTACTA TCATGCTGGC TGCCTCCATT TCCTTCTGGA CCACCAATAA TTCCCCCACC
ACCTCCCATA TGTCCAGATT CTCTTGATGA TGCTGATGCT TTGGGAAGTA TGTTAATTTC
ATGGTACATG AGTGGCTATC ATACTGGCTA TTATATGGGT TTTAGACAAA ATCAAAAAGA
AGGAAGGTGC TCACATTCCT TAAATTAAGG AGAAATGCTG GCATAGAGCA GCACTAAATG
ACACCACTAA AGAAACGATC AGACAGATCT GGAATGTGAA GCGTTATAGA AGATAACTGG
CCTCATTTCT TCAAAATATC AAGTGTTGGG AAAGAAAAAA GGAAGTGGAA TGGGTAACTC
TTCTTGATTA AAAGTTATGT AATAACCAAA TGCAATGTGA AATATTTTAC TbbACTCTAT
TTTGAAAAAC CATCTGTAAA AGACTGAGGT GGGGGTGGGA GGCCAGCACG GTGGTGAGGC
AGTTGAGAAA ATTTGAATGT GGATTAGATT TTGAATGATA TTGGATAATT ATTGGTAATT
TTATGAGCTG TGAGAAGGGT GTTGTAGTTT ATAAAAGACT GTCTTAATTT GCATACTTAA
GCATTTAGGA ATGAAGTGTT AGAGTGTCTT AAAATGTTTC AAATGGTTTA ACAAAATGTA
TGTGAGGCGT ATGTGGCAAA ATGTTACAGA ATCTAACTGG TGGACATGGC TGTTCATTGT
ACTGTTTTTT TCTATCTTCT ATATGTTTAA AAGTATATAA TAAAAATATT TAATTTTTTT
TTAAATTAAA AAAA
Homo sapiens SMN2 amino acid sequence
NCBI Ref. Seq.: NP_059107.1; UniProtKB: Q16637
(SEQ ID NO: 14)
MAMSSGGSGG GVPEQEDSVL FRRGTGQSDD SDIWDDTALI KAYDKAVASF KHALKNGDIC
ETSGKPKTTP KRKPAKKNKS QKKNTAASLQ QWKVGDKCSA IWSEDGCIYP ATIASIDFKR
ETCVVVYTGY GNREEQNLSD LLSPICEVAN NIEQNAQENE NESQVSTDES ENSRSPGNKS
DNIKPKSAPW NSFLPPPPPM PGPRLGPGKP GLKFNGPPPP PPPPPPHLLS CWLPPFPSGP
PIIPPPPPIC PDSLDDADAL GSMLISWYMS GYHTGYYMGF RQNQKEGRCS KSLN

[0431] As used herein, “SMN2 pre-mRNA” refers to an RNA sequence, including all exons, introns, and untranslated regions, transcribed from DNA encoding human SMN2.

[0432] As used herein, “intronic splicing silencer N1” or “ISS-N1” refers to an intronic splice silencing domain in intron 7 of the SMN2 gene or pre-mRNA (see e.g., Singh et al., Mol Cell Biol (2006) 26(4):1333-46). Splicing of acritical exon of human Survival Motor Neuron is regulated by a unique silencer element located in the last intron.

[0433] In some embodiments, ISS-N1 comprises the nucleic acid sequence:

[0434] CCAGCAUUAUGAAAG (SEQ ID NO: 15)

[0435] In some embodiments, the SMN2 pre-mRNA is targeted with one or more of the exemplary oligonucleotides disclosed in Tables 4-8 below in one or more SNAs. Unless indicated otherwise, the sequences contain phosphodiester internucleotide linkages.

TABLE 4

| | | |
|---|---|---|
| ASO 10-27- | 65 | moeT*/5- Me-moeC/moeA/5-Me-moeC/moeTmoeTmoeT/5-Me- |
| MOE-PS-Chol | | moeC/moeAmoeTmoeAmoeAmoeTmoeG/5-Me- |
| SMN-2PS | | moeC/moeTmoeG*moeG/iSp18//iSp18//3CholTEG/ |
| ASO 10-27- | 66 | moeT*/5-Me-moeC/moeA/5-Me-moeC/moeTmoeTmoeT/5-Me- |
| MOE-PS-Chol | | moeC/moeAmoeTmoeAmoeAmoeTmoeG*/5-Me- |
| SMN-3PS | | moeC/moeTmoeGmoeG/iSp18//iSp18//3CholTEG/ |
| ASO 10-27- | 67 | moeT*/5-Me-moeC/moeA/5 -Me-moeC/moeTmoeTmoeT/5 -Me- |
| MOE-PS-Chol | | moeC/*moeA*moeTmoeAmoeAmoeT*moeG*/5-Me- |
| SMN-5PS | | moeC/moeTmoeGmoeG/Sp18//iSp18//3CholTEG/ |
| ASO 10-27- | 68 | moeT*/5-Me-moeC/moeA/5-me-moeC/moeTmoeTmoeT/5- |
| MOE-PS-Chol | | MemoeC/*moeA*moeT*moeA*moeA*moeT*moeG*/5MemoeC/ |
| SMN-8PS | | moeTmoeGmoeG/iSp18//iSp18//3CholTEG/ |
| 5′-Chol ASO 10- | 69 | /5CholTEG//iSp18//iSp18/moeT*/5-Me-moeC/*nioeA*/5-Me- |
| 27 MOE PS | | moeC/*moeT*moeT*moeT*/5-Me- |
| SMN | | moeC/moeA*moeT*moeA*moeA*moeT*moeG*/5-Me- |
| | | moeC/*moeT*moeG*moeG |

*= phosphorothioate internucleotide linkage;
moe = 2′-O-(2-methoxyethy]);
iSp18 = internal hexaethylenegyleol spacer;
5-Me-moeC = 5′ methyl C with moe modification;
3CholTEG = 3′-Cholesteryl-TEG;
SCholTEG = 5′Cholesteryl-TEG;
TEG = tetraethylene glycol

TABLE 5

| | |
|---|---|
| ASO 10-27-Me- | mU*mC*mA*mC*mU*mU*mU*mC*mA* |
| PS-Chol | mU*mA*mA*mU*mG*mC*mU*mG* |
| SMN | mG/Sp18//Sp18//3CholTEG/ |
| | (SEQ ID NO: 70) |
| ASO 10-27- | mUmCmAmCmUmUmUmCmAmUmAmAm |
| Me-Chol | UmGmCmUmGmG/iSp18//iSp18/ |
| SMN all PO | /3CholTEG/ (SEQ ID NO: 71) |
| ASO 10-27- | mT*/5-Me-mC/*mA*/5-Me-mC/ |
| Me-PS-Chol | *mT*mT*mT*/5-Me-mC/*mA |
| SMN (5MeC and | *mT*mA*mA*mT*mG*/5-Me- |
| 5MeU) | mC/*mT*mG*mG/Sp18//Sp18 |
| | //3CholTEG/ |
| | (SEQ ID NO: 72) |
| Linear ASO | mT*/5-Me-mC/*mA*/5-Me- |
| 10-27-Me- | mC/*mT*mT*mT*/5-Me- |
| PS-SMN | mC/*mA*mT*mA*mA*mT*mG* |
| (5MeC and | /5-Me-mC/*mT*mG*mG |
| 5MeU) | (SEQ ID NO: 73) |
| Linear ASO | mUmCmAmCmUmUmUmCmAmUm |
| 10-27-Me- | AmAmUmGmCmUmGmG |
| SMN all PO | (SEQ ID NO: 74) |

*= phosphorothioate internucleotide linkage; m = 2′-O-methyl; iSp18 = internal hexaethylenegylcol spacer; 5-Me-moeC = 5′ methyl C with 2′-O-methyl modification; 3CholTEG = 3′-Cholesteryl-TEG; 3CholTEG = 3′-Cholesteryl-TEG; TEG = tetraethylene glycol

TABLE 6

| | |
|---|---|
| Morpholino | Chol5′-TCACTTTCATAATGCTGG- |
| SMN oligo | CholEG-3′ (SEQ ID NO: 75) |
| Linear | 5′-TCACTTTCATAATGCTGG-3′ |
| Morpholino | (SEQ ID NO: 76) |
| oligo | |

CholEG = Cholesterol with ethylene glycol spacer; all bases in the above two sequences contain morpholino sugar modification

TABLE 7

| | |
|---|---|
| ASO 10-27-ENA- | enT*/5-Me-enC/*enA*/5-Me-enC/*enT*enT*enT*/5-Me- |
| PS-Chol SMN | enC/*enA*enT*enA*enA*enT*enG*/5-Me- |
| | enC/*enT*enG*enG/isp18//isp18//3CholTEG/ (SEQ ID NO: 77) |
| Linear ASO 10- | enT*/5-Me-enC/*enA*/5-Me-enC/*enT*enT*enT*/5-Me- |
| 27-ENA-PS-SMN | enC/*enA*enT*enA*enA*enT*enG*/5-Me-enC/*enT*enG*enG (SEQ ID NO: 78) |

*= phosphorothioate internucleotide linkage;
en = 2′-O,4′-C-ethylene-bridged sugar modification;
iSp18 = internal hexaethylenegylcol spacer;
5-Me-enC = 5′ methyl C with en modification;
3CholTEG = 3′-Cholesteryl-TEG;
TEG = tetraethylene glycol

TABLE 8

| | |
|---|---|
| ASO 10-27-LNA- | lnT*/5-Me-lnC/*lnA*/5-Me-lnC/*lnT*lnT*lnT*/5-Me- |
| PS-Chol SMN | lnC/*lnA*lnT*lnA*lnA*lnT*lnG*/5-Me- |
| | lnC/*lnT*lnG*lnG/isp18//isp18//3CholTEG/(SEQ ID NO: 79) |
| Linear ASO 10-27- | lnT*/5-Me-lnC/*lnA*/5-Me-lnC/*lnT*lnT*lnT*/5-Me-lnC/*lnA* |
| LNA-PS-SMN | lnT*lnA*lnA*lnT*lnG*/5-Me-lnC/*lnT*lnG*lnG (SEQ ID NO: 80) |

*= phosphorothioate internucleotide linkage;
ln = LNA sugar modification;
iSp18 = internal hexaethylenegylcol spacer;
5-Me-lnC = 5′ methyl C with LNA sugar modification;
3CholTEG = 3′-Cholesteryl-TEG;
TEG = tetraethylene glycol

[0436] The term “percent identical” refers to sequence identity between two amino acid sequences or between two nucleotide sequences of oligonucleotides disclosed herein, such as antisense oligonucleotides. Identity can each be determined by comparing a position in each sequence which may be aligned for purposes of comparison. When an equivalent position in the compared sequences is occupied by the same base or amino acid, then the molecules are identical at that position, when the equivalent site occupied by the same or a similar amino acid residue (e.g., similar in steric and/or electronic nature), then the molecules can be referred to as homologous (similar) at that position. Expression as a percentage of homology, similarity, or identity refers to a function of the number of identical or similar amino acids at positions shared by the compared sequences. Expression as a percentage of homology, similarity, or identity refers to a function of the number of identical or similar amino acids at positions shared by the compared sequences. Various alignment algorithms and/or programs may be used, including FASTA, BLAST, or ENTREZ. FASTA and BLAST are available as a part of the GCG sequence analysis package (University of Wisconsin, Madison, Wis.), and can be used with, e.g., default settings. ENTREZ is available through the National Center for Biotechnology Information, National Library of Medicine, National Institutes of Health, Bethesda, Md. In one embodiment, the percent identity of two sequences can be determined by the GCG program with a gap weight of 1, e.g., each amino acid gap is weighted as if it were a single amino acid or nucleotide mismatch between the two sequences.

[0437] Other techniques for alignment are described in Methods in Enzymology, vol. 266: Computer Methods for Macromolecular Sequence Analysis (1996), ed. Doolittle, Academic Press, Inc., a division of Harcourt Brace & Co., San Diego, Calif., USA. Preferably, an alignment program that permits gaps in the sequence is utilized to align the sequences. The Smith-Waterman is one type of algorithm that permits gaps in sequence alignments. See Meth. Mol. Biol. 70: 173-187 (1997). Also, the GAP program using the Needleman and Wunsch alignment method can be utilized to align sequences. An alternative search strategy uses MPSRCH software, which runs on a MASP AR computer. MPSRCH uses a Smith-Waterman algorithm to score sequences on a massively parallel computer. This approach improves ability to pick up distantly related matches, and is especially tolerant of small gaps and nucleotide sequence errors. Nucleic acid-encoded amino acid sequences can be used to search both protein and DNA databases.

[0438] Those skilled in the art will recognize, or be able to ascertain using no more than routine experimentation, many equivalents to the specific embodiments of the invention described herein. Such equivalents are intended to be encompassed by the following claims.

[0439] All references, including patent documents, disclosed herein are incorporated by reference in their entirety.

[0440] In order that the invention described herein may be more fully understood, the following examples are set forth. The examples described in this application are offered to illustrate the compounds, pharmaceutical compositions, and methods provided herein and are not to be construed in any way as limiting their scope.

### EXAMPLES

### Example 1. SMN2-Targeted SNA to Increase Expression of SMN2 mRNA and Protein for Treatment of Spinal Muscular Atrophy

[0441] Based on these unique properties of SNAs. SNAs have been developed targeting mRNA for down regulation of gene expression and TLR9 protein to activate the immune system. Antisense SNAs for dermal diseases and TLR9 agonist SNAs for immuno-oncology applications are in clinical development. A linear and a SNA version of Spinraza were compared for their effect on the inclusion of exon 7 in SMN2 mRNA in SMA patient-derived fibroblasts. The results show that in patient-derived fibroblasts, SNA version of Spinraza yields greater expression of exon 7 included SMN2 mRNA and protein compared with the linear version of Spinraza currently used to treat SMA patients.

### Methods

[0442] Linear oligonucleotides (linear ASO) and 3′-cholesterol attached linear oligonucleotides via two hexaethyleneglycol (spacer18) moieties for SNA were synthesized with 2′-methoxyethyl (2′-MOE) and phosphorothioate (PS) backbone modification. The oligonucleotide sequence is the same as that of Spinraza. SNAs (SNA-ASO) were prepared by loading 3′-cholesterol attached oligonucleotides onto DOPC liposomes at a ratio of 30 oligonucleotide molecules per 20 nm liposome.

Oligo sequence:
(SEQ ID NO: 1)
5′- TCA CTT TCA TAA TGC TGG - (Spacer 18)₂ -
3CholTEG

[0443] SMA patient fibroblast cells (GM03813C, GM09677C and GM00232D) were obtained from Coriell Institute for Medical Research. Cells were cultured in DMEM medium containing 10% FBS and 100 U/ml penicillin and 100 μg/ml streptomycin. Linear and SNA ASOs were added to the cell cultures without transfecting agents and incubated for 48 hours or 72 hours. Then the cells were collected at 48 hours for mRNA extraction and at 72 hours for protein isolation. The levels of SMN2 mRNA, SMNA7 mRNA, and total SMN mRNAs were measured by qPCR using the following set of probes and primers. SMN2 mRNA and SMNA7 mRNA primers were obtained from IDT and the probes were from Thermo Fisher Scientific, and the commercially available primers and probes for total SMN mRNA were purchased from Life Technologies (cat #Hs00165806_ml). SMN2 mRNA forward primer: 5′-GCTG ATGCTTTGGG AAGTATGTTA-3′ (SEQ ID NO: 2), SMN2 mRNA reverse primer: 5′-CACCTTCCTTCTTTTTGATTTTGTC-3′ (SEQ ID NO: 3), SMN2mRNA probe: 5′-6FAM-TACATGAGTGGCTATCATACTT-MGBNFQ-3′ (SEQ ID NO: 4), SMNA7 mRNA forward primer: 5′-TGGACCACCAATAATTCCCC-3′ (SEQ ID NO: 5), SMNA7 mRNA reverse primer: 5′-ATGCCAGCATTT CCATATAATAGCC-3′ (SEQ ID NO: 6) and SMNA7 mRNA probe: s′-6FAM-TACATGAGTGGCTATCATACT-MGBNFQ-3′ (SEQ ID NO: 7). The levels of SMN2 protein were measured by Western blotting using SMN antibody obtained from BD Biosciences (cat #610646) and the control GRP94 protein by the Grp94 (9G10) antibody obtained from Enzo Lifesciences (cat #ADI-SPA-850). The fold increase of SMN2 mRNA over SMNA7 mRNA was calculated by dividing the values of % SMN2 mRNA expression with % SMNA7 mRNA expression.

### Results

[0444] ASO-SNAs and Linear ASOs targeting ISS-N1 site of the SMN2 mRNA were tested at various concentrations in three different SMA patient-derived fibroblasts. In addition, phenylbutyrate (PBA, a known small molecule compound, positive control) and negative controls (control SNA and control linear) were included in the assays for comparison. The results showed that ASO-SNA treatment led to greater inclusion of exon 7 in SMN2 mRNA compared with linear ASO. ASO-SNA treatment resulted in up to 45-fold increase in the inclusion of exon 7 over SMNA7 mRNA depending on the source of fibroblasts. Whereas, linear ASO resulted in about 2.5-fold higher inclusion of exon 7 over SMNA7 mRNA (FIGS. 1A and 1B). The results shown in FIGS. 1A and 1B are representative of one experiment of the three independent experiments carried out.

[0445] Next, the upregulation of SMN2 protein was measured by ASO-SNA and linear ASO at 72 hours by Western blotting. GM09677C cells (SMA patient-derived fibroblasts) were treated with SNAs for 72 hours and, then assessed by western blot and qRT-PCR. ASO-SNA treatment resulted in greater expression of SMN2 protein compared with linear ASO in GM09677C (FIGS. 2A and 2B), which is consistent with the results from the mRNA levels from above. FIG. 2A shows a Western blot of total SMN protein and loading control GRP94. GRP94 protein loading control was detected with ADI-SPA-850-F (Enzo Life Sciences). SMN was detected with VMA00249 (Bio-Rad). FIG. 2B is a densitometric quantification of SMN western blot (solid bars) and qRT-PCR of full-length SMN mRNA (hashed bars) from identically treated wells. SMN qRT-PCR was performed on SMA patient fibroblasts (GM09677C) that were plated in 96-well plates and treated in triplicate with SNAs in complete media. After cell lysis, cDNA was derived from extracted RNA and assessed by qRT-PCR with technical duplicates for each sample. Full-length SMN2 was measured relative to GAPDH.

### Conclusion

[0446] ASO-SNA treatment of SMA patient-derived fibroblasts facilitates increased of exon 7 inclusion and SMN2 protein expression compared with the same sequence of linear ASO (Spinraza). Previous studies have shown that oligonucleotides in SNA are taken up by cells to greater extent than linear oligonucleotides and function as potent antisense agents at mRNA level in the cytoplasm to down regulate gene expression. The current results are the first demonstration of SNAs interacting with pre-mRNA in the nucleus facilitating exon 7 inclusion in SMN2 mRNA in SMA patient-derived fibroblasts.

[0447] Thus, these in vitro studies showed that SNAs are several-fold more potent in generating exon7 included SMN2 mRNA and full-length protein compared with linear oligo.

[0448] Based on the data from patient-derived fibroblasts, next step is to test in vivo in mouse model to evaluate the potency of SMN2-targeted SNA in comparison with a linear MOE-ASO. Tolerability of SNA compounds can be evaluated by intrathecal (IT) or intracerebroventricular injection (ICV). Spinraza is administered to patients using IT administration so ideal comparison will be to use IT administration in mouse models as well. It would be a great improvement to be able to deliver the therapeutic SNA into central nervous system using other administration modalities, such subcutaneous, intramuscular, intravenous, oral, ophthalmic, topical delivery in the ear as ear drops or similar forms, transtympanic administration, etc. These other administrations are less invasive compared to intrathecal administration and may improve patient comfort. Spinraza is administered in 5 mL volume (2.4 mg/mL); in mice this volume would be much smaller, on the order of a few microliters. It is aimed to test as high a dose of oligonucleotide as practical. In animal models, survival and other parameters such as SMN mRNA and protein levels, might be sufficient especially for modelling severe SMA. Electromyograms (EMG) can also be recorded for compound muscle action potential (CMAP) as well as motor unit number estimation. These parameters are reduced in SMA. If SMN levels are normalized by therapeutic interventions, these values have been observed to recover. In human clinical trials, CMAP is observed to correlate well with motor function and has the potential value as a relevant surrogate for disease status. This is one of the only measures that can be made in humans and mouse models.

### Example 2. Spherical Nucleic Acids (SNAs) are Versatile Facilitators of Oligonucleotide-Mediated Splice Modulation

[0449] Spherical nucleic acids (SNAs) are dense, radial arrangements of oligonucleotides around a nanoparticle core. Studies have shown the utility of SNAs for immune stimulation using CpG oligonucleotides and for gene knockdown mediated by antisense oligonucleotides or siRNA. Recently, SNAs have shown promise as effectors of splice modulation through delivery of splice-switching oligonucleotides (SSOs). This work investigates the suitability of SNAs broadly for splice modulation.

[0450] Alternative splicing of pre-mRNA leads to production of divergent mature mRNA products and is a major source of proteome diversity. Indeed, at least 70% of human genes are predicted to undergo alternatively splicing and it is estimated that 60% of human genetic diseases arise from mutations that effect splicing. Clearly, broadly applicable methods to influence splicing are of significant therapeutic value. Thus, when considering SNAs for splice modulation, it is critical to evaluate their efficacy across splicing contexts and targets.

[0451] SNAs were designed to facilitate exon skipping of signal transducer and activator of transcription 3 (STAT3), RE1 silencing transcription factor (REST), interleukin 17 receptor α (IL17RA), or IL1 receptor accessory protein (IL1RAP), and their efficacy was compared to that of linear SSOs. The results establish SNAs as comprehensively more effective (by 2- to 3-fold) at inducing preferential production of a natural transcript variant (IL17RA, REST), a novel, stable splice variant (IL1RAP), and a novel, frame-shifted variant that leads to nonsense-mediated decay (STAT3). SNAs exhibited this potency in several relevant cell lines and, in the case of IL17RA-targeted SNAs, in human skin biopsies. Additionally, survival of motor neuron 2 (SMN2)-targeted SNAs dramatically improved exon inclusion in human patient fibroblasts, exhibiting a more than 10-fold potency improvement over linear SSOs.

[0452] A unique feature of SNAs is that they can be designed to deliver multiple oligonucleotides to the same cell, enabling synergistic targeting of a single pre-mRNA with disparate SSOs or facilitating modulation of multiple therapeutic targets simultaneously by targeting different genes. Proof-of-concept work targeting two loci on the IL1RAP gene demonstrates the power of this approach. In this context, a bispecific SNA comprised of two SSOs targeting IL1RAP outperformed either SSO delivered on SNA individually.

[0453] In summary, the data reveal the potential of SNAs for mRNA reprogramming through splice modulation of pre-mRNA in a variety of modes, across therapeutic targets, and at multiple genetic loci. This establishes SNAs as potentially transformative therapies for diseases ranging from inflammatory skin conditions to cancer to rare neurological disorders.

[0454] Endpoint PCR evaluation and real time PCR quantification of genetic variants were conducted in vitro in several distinct cell types. Disease modification in vivo in the SMNA7 mouse model was also conducted. Results show the utility of SNAs for this strategy using the examples of IL17RA, REST, IL1RAP, and STAT3. SNAs enable splice modulation via exon skipping to a natural variant in the case of IL17RA. It was found that SNAs reduce transmembrane IL17RA in two dermal cell lines, shown by qPCR quantification of transmembrane IL17RA (see FIGS. 3A-3D). It was elucidated that this reduction of IL17RA occurs via splice modulation to generate a soluble variant through endpoint PCR. Endpoint PCR shows a switch from transmembrane to soluble IL17RA (see FIGS. 3C-3D). SNAs also reduce transmembrane IL17RA in relevant ex vivo models. Human skin biopsies and human skin equivalents were evaluated by qPCR for transmembrane IL17RA (see FIGS. 4A-4B). Furthermore, SNAs improve exon 3 skipping of REST. SNAs enable exon skipping of REST in free uptake superior to that of the linear oligonucleotide. This is supported by qPCR and endpoint PCR data, with 5 μM dose in MEF cells (see FIGS. 5A-5B). It was also found that bispecific SNAs induce splice modulation of IL1RAP, qPCR data shows that two different oligonucleotides (ONs) work synergistically to induce splice modulation of IL1RAP (see FIGS. 7 and 6A-6C). Endpoint PCR data support this synergistic effect (see FIGS. 9A-9C). SNAs facilitate exon skipping of STAT3; SNA comprised of the fully 2′-MOE modified oligonucleotide ST7 reduced total STAT3 levels, indicating production of an out-of-frame transcript that undergoes nonsense-mediated decay (see FIG. 8). Additionally, SNA treatment causes superior exon 7 inclusion in SMN2. An example of qPCR in vitro data supporting exon 7 inclusion in SMN2 is shown in FIG. 9A-9C.

[0455] Cumulatively, the data reveals the potential of SNAs to powerfully influence pre-mRNA splicing in a variety of modes, across numerous genetic targets, and at multiple genetic targets or loci (see FIGS. 3A-9C). Thus, SNAs have the potential to be transformative therapies for diseases ranging from inflammatory skin conditions to cancer to rare neurological disorders.

### Example 3. SMN2-Targeted Antisense Spherical Nucleic Acid (SNA) Treatment of SMA in a Mouse Model

[0456] The constructs were tested in vivo in a mouse model to evaluate the potency of SMN2-targeted SNA in comparison with a linear MOE-ASO. Tolerability of SNA compounds can be evaluated by intrathecal (IT) or intracerebroventricular injection (ICV). Spinraza is administered to patients using IT administration so one ideal comparison will involve IT administration in mouse models. It would be a great improvement to be able to deliver the therapeutic SNA into central nervous system using other administration modalities, such subcutaneous, intramuscular, intravenous, oral, ophthalmic, topical delivery in the ear, such as ear drops or similar forms, transtympanic administration, etc. These other administration routes are less invasive compared to intrathecal administration and may improve patient comfort. Spinraza is administered in 5 mL volume (2.4 mg/mL); in mice this volume would be much smaller, on the order of a few microliters. In animal models, survival and other parameters such as SMN mRNA and protein levels, might be sufficient especially for modelling severe SMA. Electromyograms (EMG) can also be recorded for compound muscle action potential (CMAP) as well as motor unit number estimation. These parameters are reduced in SMA. If SMN levels are normalized by therapeutic interventions, these values have been observed to recover. In human clinical trials, CMAP is observed to correlate well with motor function and has the potential value as a relevant surrogate for disease status. This is one of the only measures that can be made in humans and mouse models.

[0457] It has previously been shown that morpholino antisense treatment directed at the negative regulatory ISS-N1 in SMN2 results in increased incorporation of SMN2 exon7 and increased levels of SMN protein. It has further been shown that the second hnRNP A1 site at −85-109 in intron7 can also be blocked to give an equivalent level of SMN to blocking ISS-N1. However due to delivery to critical cells the latter therapy was not as effective when used as a morpholino as ISS-N1. The blocking of ISS-N1 as well as −85-109 results in increased survival and function of SMA model mice. In addition, there is significant recovery of the electrophysiologic function. The latter is critical as regards SMA treatment in humans as in SMA there is clear decrement of motor neuron function in human and no critical evidence for a role of the periphery. Indeed, patients treated early using either antisense oligonucleotide or gene therapy show remarkable improvement in phenotype achieving milestones never observed in SMA patients.

[0458] An ASO targeting ISS-N1 site of SMN2 mRNA (−10-27) with MOE chemistry (Spinraza) has been recently approved by the FDA. When using an intrathecal delivery system in human SMA the antisense oligonucleotide is showing good effect when treatment is given pre-symptomatically. In preclinical work, the MOE-ASO did show toxicity in mice and the MOE-ASO could not be used at the same concentration as the morpholino. Passini et al used a single dose of MOE-ASO via intracerebral ventricular (ICV) injection up to 8 μg and obtained a survival improvement from 14 days to 23 days, Hua et al used a ICV dose of 20 μg with no adverse effect and in a different SMA animal model had an increased survival from 10 days to 16 days. Hua et al also obtained further improvement by giving the ASO into the periphery. This contrasts with the morpholino data that showed survival beyond 100 days in the delta7 SMA mice whereas mice without treatment lived for 13 days.

### Methods

[0459] Linear oligonucleotides (linear ASO) and 3′-cholesterol attached linear oligonucleotides via two hexaethyleneglycol (spacer18) moieties for SNA were synthesized with 2′-methoxyethyl (2′-MOE) and phosphorothioate (PS) backbone modification. The oligonucleotide sequence is the same as that of Spinraza. SNAs (SNA-ASO) were prepared by loading 3′-cholesterol attached oligonucleotides onto DOPC liposomes at a ratio of 30 oligonucleotide molecules per 20 nm liposome particle.

[0460] Compounds were administered to mice by intracerebro-ventricular injections as described previously (P. N. Porensky, et al, Hum. Mol. Genet. 21, 1625-1638, 2012). Briefly, P0 pup was cryo-anesthetized and hand-mounted over a back-light to visualize the intersection of the coronal and sagittal cranial sutures (bregma). A fine-drawn capillary needle with injection assembly was inserted 1 mm lateral and 1 mm posterior to bregma, and then tunneled 1 mm deep to the skin edge (approximating) ipsilateral lateral ventricle. An opaque tracer (Evans Bluet 0.04%) was added to the reagent to visualize the borders of the lateral ventricle after injection of 2 or 3 μl of SNA-ASO or linear ASO. A single dose of SNA-ASO or linear ASO at 10, 20 or 30 μg dose/mouse administered by ICV at age P0. Following administration of compounds, mouse survival and body weights were recorded.

[0461] Spinal cords of SMA mice treated with 30 μg dose of SNA-ASO on P0 and untreated control mice were collected on P0 and measured full-length SMN2 mRNA transcript by digital droplet PCR as described previously by P. N. Porensky, et al, Hum. Mol. Genet. 21, 1625-1638, 2012. Table 9 outlines the compounds used.

TABLE 9
Protocol for the study of SMN2 antisense SNA and MOE-ASO (linear oligo) in SMN^{-/-}
SMN2 D7 SMA mice

| | V olume/ | Dose/ | | | Animals/ | |
|---|---|---|---|---|---|---|
| Compound | dossing | animal | Phenotype | Genotype | group | Outcome |
| -10-27 linear | 2 μl once | 10 μg | SMA | Tox trial | 5 | Tox |
| oligo | | | | | | |
| -10-27 linear | 2 μl once | 20 μg | SMA | Tox trial | 5 | Tox |
| oligo | | | | | | |
| -10-27 SNA | 2 μl once | 10 μg | SMA | Tox trial | 5 | Tox |
| -10-27 SNA | 2 μl once | 20 μg | SMA | Tox trial | 5 | Tox |
| -10-27 linear | 2 μl once | 10 μg | SMA | Smn^{-/-} | 13 | Survival/EMG |
| oligo | | | | SMN2 D7 | | |
| -10-27 linear | 2 μl once | 20 μg | SMA | Smn^{-/-} | 13 | Survival/EMG |
| oligo | | | | SMN2 D7 | | |
| -10-27 linear | 3 μl once | 30 μg | SMA | Smn^{-/-} | 13 | Survival/EMG |
| oligo | | | | SMN2 D7 | | |
| -10-27 SNA | 2 μl once | 10 μg | SMA | Smn^{-/-} | 13 | Survival/EMG |
| | | | | SMN2 D7 | | |
| -10-27 SNA | 2 μl once | 20 μg | SMA | Smn^{-/-} | 13 | Survival/EMG |
| | | | | SMN2 D7 | | |
| -10-27 SNA | 3 μl once | 30 μg | SMA | Smn^{-/-} | 13 | Survival/EMG |
| | | | | SMN2 D7 | | |
| ISS-N1 PMO | 2 μl once | 40 μg | SMA | Smn^{-/-} | 13 | Survival/EMG |
| oligo | | | | SMN2 D7 | | |
| Control SNA | 3 μl once | 30 μg | SMA | Smn^{-/-} | 13 | Survival/EMG |
| | | | | SMN2 D7 | | |
| RNA testing | 2 μl | | SMA | Smn^{-/-} | 5 × 6 = 30 | ddPCR |
| | | | | SMN2 D7 | | |
| SMN protein | 2 μl | | SMA | Smn^{-/-} | 5 × 6 | Western |
| | | | | SMN2 D7 | | |
| RNA testing | 2 μl | | Carrier | Smn+/− | 5 × 6 = 30 | ddPCR |
| | | | | SMN2 D7 | | |
| SMN protein | 2 μ1 | | Carrier | Smn+/− | 5 × 6 | Western |
| | | | | SMN2 D7 | | |

[0462] The pharmacodynamic activity of the compounds is followed by survival of mice in each group compared with untreated mice. In a previous study, morpholino ASO prolonged the Smn^{-/-} SMN2 D7 mice survival over 100 days, which serves as a reference for the current study. Further, the EMGs will be recorded for muscle action potential (CMAP) as well as motor unit number estimation. Both these parameters are reduced in SMA at 6 days and beyond. When SMN levels are corrected due to the action of the test compounds, these values recover and when mice live out can reach normal levels. This is an important measure as it shows that the motor neuron has recovered and the muscle is innervated correctly. It is one of the only measures that can be made in man and mouse and is altered in human SMA.

[0463] The measures of SMN protein and RNA give a measure of the increased incorporation of SMN exon7 and the amount of SMN protein. In the cases of the carrier mice tested only the human SMN is detected thus the increase can be seen on a background where no cell loss is occurring.

### Results

[0464] A single dose of SNA-ASO or linear ASO was injected to mice on P0 at 10, 20 or 30 μg. The Kaplan-Meier survival plots of SMA mice treated with SNA-ASO and linear ASO and untreated mice are shown in FIGS. 10A-10B. Mice were genotyped at P0 (day of birth) and injected via Intracerebroventricular injection (ICV) on P0. The recorder of events was blinded to genotype and treatment. Control untreated mice died within 18 days with a median survival of about 14 days. Mice treated with linear ASO showed a median survival of 16, 17 and 2 days at 10, 20 and 30 μg doses, respectively with a maximal survival prolongation of about 28 days. SNA-ASO treatment lead to increased survival of SMA mice at all dose levels compared with linear ASO. The median survival of SNA-ASO treated mice was 26, 69 and 70 days at 10, 20, and 30 μg doses, respectively. The survival of SMA mice was prolonged up to about 117 days in 20 μg SNA-ASO dose group and the mice in 30 μg dose group have not reached end point. These results clearly demonstrate that SNA-ASO prolongs survival of SMA mice to a greater extent than linear ASO. Additionally, early death of mice in 30 μg dose linear ASO group suggest possible toxicity. These results suggest that SNA-ASO treatment is safe and well tolerated up to 30 μg dose level in SMA mice.

[0465] FIG. 10A shows Δ7SMA mice treated with the 30 μg dose Nusinersen-SNA had increased survival to a maximum of 82 days while scramble SNA has no effect on survival. FIG. 10B shows that linear Nusinersen improved survival of Δ7 SMA mice to a maximum of 28 days. The data is also summarized in the table below.

| Treatment | | Mean | Maximum | |
|---|---|---|---|---|
| with | # of | survival | survival | Log rank |
| Nusinersen | mice | (days) | (days) | p value |
| Linear 10 μg | 5 | 14.8 ± 4.0 | 26 | NS |
| Linear 20 μg | 10 | 14.0 ± 3.0 | 28 | NS (censored) |
| Linear 30 μg | 5 | 2.2 ± 0.1 | 2 | Toxicity |
| SNA 10 μg | 8 | 25.7 ± 3.3 | 40 | 0.00064 |
| SNA 20 μg | 9 | 57.0 ± 14.0 | 115 | .002 |
| | | | | censored |
| SNA 30 μg | 23 | 45.6 ± 6.1 | 82 | 0.000017 |
| | | | | censored |
| Scrambled SNA 30 μg | 6 | 12.5 ± 2.5 | 18 | NS |
| untreated Δ7SMA | 16 | 14.3 ± 0.7 | 18 | Tested against |

[0466] Phenotypic changes, including weight changes, on the treated mice were assessed. Weight curves to 21 days of age in treated and untreated control mice are shown in FIGS. 11A and 11B. Mice were weighed each day. FIG. 11A shows that weights are similar in Δ7SMA mice treated with linear or Nusinersen-SNA treated mice. FIG. 11B shows that weights are similar in Δ7SMA mice treated with morpholino to ISS-N1 or Nusinersen-SNA. The scramble-SNA did not alter the weight of the Δ7SMA mice.

[0467] To examine if the treatment of SMA mice with SNA-ASO lead to increased levels of SMN2 full-length mRNA transcript, spinal cords were collected on P10 from mice treated with 30 μg SNA-ASO and untreated control mice, and measured SMN2 mRNA transcript levels by digital droplet PCR. The results shown in FIG. 12 demonstrate that SNA-ASO treatment increased the full-length SMN2 mRNA transcript in SMA mice compared with untreated mice on P10.

[0468] Thus, treatment of SMA mice with a single ICV dose of ASO-SNA increased exon 7 inclusion. Moreover, the treatment of SMA mice with ASO-SNA resulted in increased median survival of up to 69/70 days with a prolongation of survival beyond 100 days compared with linear ASO. Further the SNA-ASOs are safe and well tolerated in SMA mice compared with linear ASO. These animal model studies support delivery of SNA to CNS and for neuromuscular disease treatment.

[0469] The SNAs increased uptake of MOE Nusinersen in cell models lacking SMN1 but containing SMN2, resulting in increased amounts of full-length mRNA and SMN protein from SMN2. Additionally, SNAs when delivered to CSF in the Δ7SMA mouse model allow increased dosing of Nusinersen and increased efficacy with prolonged survival of SMA mice. SNAs when delivered to CSF in the Δ7SMA mouse model also have increased full-length SMN mRNA levels in spinal cord tissue. In view of these data demonstrating the enhanced use of SNA relative to Nusinersen, the therapeutic utility of the SNA is substantial.

[0470] Additional experiments for further analysis include: Performing EMG, compound muscle action potential (CMAP) and motor unit number estimation (MUNE) to assess the extent of motor neuron correction and determining Nusinersen-SNA bio-distribution and SMN levels in all treatment groups using ELISA and Western blot.

### Example 4. Comparative Analysis of ¹²⁵I-Oligonucleotides by SPECT/CT Imagine in Sprague Dawley Rats

[0471] Example 1 illustrates that, compared to linear nusinersen, the SNA version of nusinersen has superior splice modulating activity in cell culture in SMA-patient derived fibroblasts. The examples above also illustrate that, in mouse models of SMA, in comparison to linear nusinersen, the SNA version of nusinersen increases median survival and has lower toxicity at higher doses.

[0472] The central nervous system (CNS) distribution of intrathecally administrated oligonucleotides (linear ASO and SNA-ASO) was characterized using single-photon emission computed tomography combined with computed tomography (SPECT/CT) imaging in Sprague Dawley rats. Linear ASO and 3′-cholesterol attached linear oligonucleotides via two hexaethyleneglycol (spacer18) moieties for SNA were synthesized with 2′-methoxyethyl (2′-MOE) and phosphorothioate (PS) backbone modifications as described below. The oligonucleotide sequence is the same as that of Spinraza. The oligonucleotides were further modified on the 5′ terminus with amino modified to enable eventual attachment of iodine-125 radio-label element. SNAs (SNA-ASO) were prepared by loading 3′-cholesterol attached oligonucleotides onto DOPC liposomes at a ratio of 30 oligonucleotide molecules per 20 nm liposome particle. The oligonucleotides in both linear ASO and SNA-ASO groups were labeled with iodine-125. The radio-labeled compounds were injected into SD rats (up to 3 rats per group) and whole body SPECT/CT was performed at 0, 0.25, 0.5, 0.75, 6, 24, 72 and 168 hours after injection, 0 hours after injection is essentially immediately after injection of the radio-labeled compounds. Each rat received 180 μg of radio-labeled oligonucleotide in single bolus injection via intrathecal administration in the lower lumbar region, around the 6′ lumbar vertebra.

| Compound | SEQ ID NO | Sequence |
|---|---|---|
| Linear ASO | 81 | /5AmMC6/*moeT*/5-Me-moeC/*moeA*/5-Me- |
| | | moeC/*moeT*moeT*moeT*/5-Me- |
| | | moeC/*moeA*moeT*moeA*moeA*moeT*moeG*/5-Me- |
| | | moeC/*moeT*moeG*moeG |
| SNA-ASO | 82 | /5AmMC6/*moeT*/5-Me-moeC/*moeA*/5-Me- |
| | | moeC/*moeT*moeT*moeT*/5-Me- |
| | | moeC/*moeA*moeT*moeA*moeA*moeT*moeG*/5-Me- |
| | | moeC/*moeT*moeG*moeG/isp18//isp18//3CholTEG/ |

*= phosphorothioate internucleotide linkage;
moe = 2′-O-(2-methoxyethyl);
iSp18 = internal hexaethylenegylcol spacer;
5-Me-moeC = 5′ methyl C with moe modification;
3CholTEG = 3′-Cholesteryl-TEG;
5CholTEG = 5′Cholesteryl-TEG;
TEG = tetraethylene glycol;
5AmMC6 = 5′-Amino-Modifier C6

[0473] The SPECT/CT image analyses show that there is a profound difference between the distribution and persistence of linear ASO compared with SNA-ASO. The linear ASO rapidly distributes from the site of administration in lower lumbar region to the other areas of the spinal cord. Within 1-6 hours, noticeable amount of signal from the iodine label is present in the brain as well. Over the course of the 7-day monitoring period, starting as early as 6-hours post-administration, the oligonucleotide signal is decreasing in many regions of the CNS, and is being observed via the kidneys.

[0474] By contrast. SNA-ASO distributed away from the site of administration relatively slowly. During the first hour, oligonucleotide is detectable in the spinal cord but not in the brain. Starting at 6 hours post-administration, high amount of oligonucleotide is present in the brain along with the spinal cord. This strong signal remains present in the brain and parts of the spinal cord through the 7-day monitoring period. Less SNA-ASO is observed in the kidney, which likely indicates a relatively slow clearance rate of SNA-ASO from the CNS. Overall, SNA-ASO is persistent in the CNS longer and at higher levels compared to linear ASO.

[0475] The whole body images were further analyzed to determine percent of injected dose per gram of tissue present in various regions of interest. Regions of interest, including 13 regions of rat brain, were placed onto each image using automated software tools or approximate anotomical location. Fixed volume regions of interest were used for regions with limited signal. Iodine-125 levels were measured, converted to units of activity, decay corrected and corrected for background radiation. The values were converted to percent injected dose per gram of tissue. Comparison between linear ASO and SNA-ASO shows that following intrathecal injection, SNA delivers approximately 34-71% more oligonucleotide to the whole brain compared to linear ASO. For various regions of the brain, generally linear ASO shows higher oligonucleotide levels at early time points, usually at 0 hours. Unexpectedly, SNA generally shows higher oligonucleotide levels at later time points, typically starting at 6 hours but often earlier for many regions of the brain. Regions with relatively higher distribution for SNA ASO include amygdala (approximately 41-75% higher), basal ganglia (approximately 26-37% higher), cerebellum (approximately 25-78% higher), corpus callosum (approximately 6-149% higher), cortex (approximately 14-73% higher), hippocampus (approximately 6-102% higher), hypothalamus (approximately 41-72% higher), midbrain (approximately 32-73% higher), olfactory (approximately 61-102% higher), ventricles (approximately 8-79% higher), septal area (approximately 19% higher), thalamus (approximately 2-92% higher), and white matter (approximately 27-72% higher). Similar data are also observed in the cervical and thoracic CSF where SNA shows approximately 7-77% and 92-103% higher distribution respectively. In the lumbar CSF, where the compounds are administered, SNA ASO shows higher distribution at nearly all time points (approximately 27-59% higher). Surprisingly, the linear ASO appears at high levels in the kidneys whereas SNA ASO shows high levels in the liver, and superficial and deep cervical lymph nodes, which indicates distinctly different distribution and clearance profiles for SNA ASO compared to linear ASO.

[0476] The longer persistence of SNA-ASO suggests that SNA-based therapy could be administered less frequently compared to linear ASO. Since the examples also illustrate that SNA version of nusinersen is not toxic at high doses, in contrast to linear nusinersen which has high toxicity at 30 μg dose in SMA mouse model, higher absolute amount of therapy can also be administered. The combination of higher persistence and lower toxicity can potentially further reducing dosing frequency. The higher distribution in various regions of the brain could enable intrathecal administration of therapies that target diseases of regions of the brain that are quite distal from site of administration.

[0477] The subjects were male Sprague Dawley rats (n=9 injected; n=6^{b} on study). The modalities were whole body SPECT/CT. Image agents were formulated with artificial cerebrospinal fluid (aCSF) for intrathecal (IT) injection. The test article is ¹²⁵I-ASO 10-27-MOE-PS SNA, spherical nucleic acid (SNA) composed of an oligonucleotide labeled with iodine-125. The control article is ¹²⁵I-ASO 10-27-MOE-PS, linear ASO labeled with iodine-125. The study design is summarized in Table 10.

TABLE 10

| | | Radiolabeled Test Article | | | | | | |
|---|---|---|---|---|---|---|---|---|
| | | | Dose | Dose | Dose | | Gamma | |
| | Number of | Test | Level | Volume, | Radioactivity | SPECT/CT | Counting | Acquisition |
| Group | Animals/Sex | Article | (μg) | Route | (μCi) | Timepoints | Samples | Timeline |
| Group 1 | 3M | 125I- | ~180 | 30 μL + 40 μL | 263.5 ± 94.5 | 0-1, 6, 24, | Whole | Aug. 28, 2018- |
| | | ASO | | flush aCSF, | | 72, and | Blood | Sep. 4, 2018 |
| | | Linear | | IT | | 168 hours | Plasma | Sep. 4, 2018- |
| Group 2 | 3M | 125I- | ~180 | 30 μL + 40 μL | 241.1 ± 65.0 | | | Sep. 11, 2018^{a} |
| | | ASO | | flush aCSF, | | | | |
| | | SNA | | IT | | | | |

^{a}Imaging dates for animal A4007 (Linear ASO Group). Animal maintains same imaging timepoints as first cohort.
^{b}Only five animals will be used in quantitative analysis.

### Analysis Methods

### Image Analysis

[0478] SPECT images were co-registered to CT images and resampled to uniform voxel sizes (0.3 mm³). Regions of Interest (ROIs) were defined using various methods in VivoQuant software. Invicro's 13-region rat brain atlas was placed automatically onto each image using the 3D Brain Atlas Tool in VivoQuant. Fixed volume ellipsoidal ROIs were placed in the center of the liver, kidneys and spleen to encompass areas of representative concentration for each respective region. The superficial and deep cervical lymph nodes, and thyroid were identified using the SPECT. For subjects with limited SPECT activity in these regions, ROIs were placed in the approximate anatomical location using the CT for reference. Fixed volume spherical ROIs were placed in the left and right sides of each of these regions. The CSF was defined using connected thresholding and then split into three regions based on identification of vertebrae: lumbar, thoracic, cervical.

### Gamma Counting

[0479] 1000 μL aliquots of blood and plasma were collected at 168 hours, placed in tubes and assayed for radioactivity in a gamma counter. The measured count rate, counts per minute (CPM), was converted to units of activity (μCi) using an efficiency value of 0.673 counts per decay for ¹²⁵I. Activities were decay corrected from the time of measurement to the time of injection and corrected for background radiation.

[0480] SPEC/CT images of rats 168 hours post-intrathecal administration of ¹²⁵I-ASOs are shown in FIG. 32. The concentration (% ID/g) of ¹²⁵I-Linear ASO was significantly greater than ¹²⁵I-SNA ASO in the kidneys at 6, 24, 72, 168h (FIG. 14). The injection of subject 4001 appeared to be in the epidural space and was thus excluded from quantitative analysis. SPECT/CT images of IT injection of ¹²⁵I-ASOs in rat is shown at 6 hours and 168 hours in FIG. 33. Preliminary images of ¹¹²I-ASO maximum intensity projections (MIPs) for all subjects are shown in FIGS. 34-40. The concentration (% ID/g) of ¹²⁵I-Linear ASO was significantly greater than ¹²⁵I-SNA ASO in the kidneys at 6, 24, 72, 168 h (p<0.05, IS t-test) (FIG. 15). SPECT/CT images at 6 and 168h are shown in rats after IT injection of ¹²⁵I-ASOs (FIG. 42). Graphs of further results are shown in FIGS. 13-30. ¹²⁵I measurements were quantified in organs and regions of the brain (i.e., to generate the data shown in FIGS. 13, 14, 15, 16, 17, 18, 19, 21, 22, 23, 24, 25, 26, 27, 28, 29 and 30) according to the region of interest (ROI) analysis key shown in FIG. 41.

### Example 5. Effects of SNA-ASO, Gold (Au)-SNAs and Linear Oligonucleotides Comprising the Sequence of Spinraza on SMN2 and SMN2Δ7 Levels in Fibroblasts

### Methods

[0481] Linear oligonucleotides with the same sequence as spinraza were synthesized with 2-methoxyethyl (2′-MOE) and phosphorothioate (PS) backbone modifications. These oligonucleotides contained 3′ cholesterol, distearyl, monothiol ordithiol modifications attached via hexaethyleneglycol (spacer18) moieties. Nonsense control sequences were also synthesized to compare efficacy. Table 11 contains information on oligonucleotide sequence and modifications. SNAs (SNA-ASO) were prepared by loading oligonucleotides containing 3′ cholesterol ordistearyl onto DOPC liposomes. Oligonucleotides containing monothiol and dithiol modifications were functionalized onto gold nanoparticles to produce gold SNAs (Au-SNA). SNA core size and oligonucleotide loading densities per particle are described in Table 12.

TABLE 11

| 2′-OMOE | SEQ | |
|---|---|---|
| Chemistry | ID NO | Sequence |
| ASO 10-27- | 83 | moeT*/5-Me-moeC/*moeA*/5-Me- |
| MOE-PS-Chol | | moeC/*moeT*moeT*moeT*/5-Me- |
| | | moeC/*moeA*moeT*moeA*moeA*moeT*moeG*/5-Me- |
| | | moeC/*moeT*moeG*moeG/isp18//isp18//3CholTEG/ |
| SMN Control- | 84 | moeT*moeG*moeT*moeA*moeT*/5-Me- |
| 1-MOE-PS- | | moeC/*moeT*/5-Me- |
| Chol | | moeC/*moeA*moeT*moeT*moeG*moeT*moeA*moeG/isp |
| | | 18//isp18//3CholTEG/ |
| ASO 10-27- | 85 | moeT*/5-Me-moeC/*moeA*/5-Me- |
| MOE-PS | | moeC/*moeT*moeT*moeT*/5-Me- |
| Distearyl | | moeC/*moeA*moeT*moeA*moeA*moeT*moeG*/5-Me- |
| | | moeC/*moeT*moeG*moeG/iSP18//iSP18//branch//STA/ |
| SMN Control- | 86 | moeT*moeG*moeT*moeA*moeT*/5-Me- |
| MOE-PS- | | moeC/*moeT*/5-Me- |
| Distearyl | | moeC/*moeA*moeT*moeT*moeG*moeT*moeA*moeG/iSp |
| | | 18//iSp18//branch//STA/ |
| ASO 10-27- | 87 | moeT*/5-Me-moeC/*moeA*/5-Me- |
| MOE-PS | | moeC/*moeT*moeT*moeT*/5-Me- |
| Monothiol | | moeC/*moeA*moeT*moeA*moeA*moeT*moeG*/5-Me- |
| | | moeC/*moeT*moeG*moeG/iSP18//iSP18//3ThioMC6-D/ |
| SMN Control- | 88 | moeT*moeG*moeT*moeA*moeT*/5-Me- |
| MOE-PS | | moeC/*moeT*/5-Me- |
| Monothiol | | moeC/*moeA*moeT*moeT*moeG*moeT*moeA*moeG/iSp |
| | | 18//iSp18//3ThioMC6-D/ |
| ASO 10-27- | 89 | moeT*/5-Me-moeC/*moeA*/5-Me- |
| MOE-PS | | moeC/*moeT*moeT*moeT*/5-Me- |
| Dithiol | | moeC/*moeA*moeT*moeA*moeA*moeT*moeG*/5-Me- |
| | | moeC/*moeT*moeG*moeG/iSP18//iSP18//3SerinolDTPA/ |
| SMN Control- | 90 | moeT*moeG*moeT*moeA*moeT*/5-Me- |
| MOE-PS | | moeC/*moeT*/5-Me- |
| Dithiol | | moeC/*moeA*moeT*moeT*moeG*moeT*moeA*moeG/iSp |
| | | 18//iSp18//3SerinolDTPA/ |

*= phosphorothioate internucleotide linkage;
moe = 2′-O-(2-methoxyethyl);
iSp18 = internal hexaethyleneglycol spacer;
5-Me-moeC = 5′ methyl C with moe modification;
3CholTEG = 3′-Cholesteryl-TEG;
5CholTEG = 5′Cholestery-TEG;
TEG = tetraethylene glycol;
branch = symmetrical branching;
STA = stearyl;
3ThioMC6-D = Monothiol;
3SerinolDTPA = Dithiol serinol

TABLE 12

| | SNA Core | Oligonucleotides |
|---|---|---|
| SNA Oligonucleotide | (core diameter in nm) | per Core |
| ASO 10-27-MOE-PS-Chol | DOPC (20) | 30 |
| SMN Control-MOE-PS-Chol | DOPC (20) | 30 |
| ASO 10-27-MOE-PS Distearyl | DOPC (20) | 30 |
| SMN Control-MOE-PS- | DOPC (20) | 30 |
| Distearyl | | |
| ASO 10-27-MOE-PS Monothiol | Gold (13) | 198 |
| SMN Control -MOE-PS | Gold (13) | 197 |
| Monothiol | | |
| ASO 10-27-MOE-PS Dithiol | Gold (13) | 147 |
| SMN Control -MOE-PS Dithiol | Gold (13) | 155 |

[0482] SMA patient fibroblast cells (GM09677C) were obtained from Coriell Institute for Medical Research and cultured in EMEM medium containing 15% FBS. Fibroblasts were plated in a 96-well plate at a density of 10,000 cells per well. SNA-ASOs, Au—SNAs or linear cholesterol/distearyl oligonucleotides were added to the culture media in triplicate. After 48 hours of treatment the cells were collected for mRNA extraction. The levels of SMN2, SMN2Δ7, and total SMN2 mRNAs were measured by RT-PCR using assays from ThermoFisher Scientific. SMN2 mRNA, SMNA7 mRNA primer and probe sequences were: SMN2 mRNA forward primer: 5′-GCTG ATGCTTIGGG AAGTATG1TA-3′ (SEQ ID NO: 2), SMN2 mRNA reverse primer: 5′-CACCT′CCTTCTITITGATTITGTC-3′ (SEQ ID NO: 3), SMN2 mRNA probe: 5-6FAM-TACATGAGTGGCTATCATACT′-MGBNFQ-3′ (SEQ ID NO: 4), SMN2Δ7 mRNA forward primer: 5′-TGGACCACCAATAATTCCCC-3′ (SEQ ID NO: 5), SMN2Δ7 mRNA reverse primer: 5′-ATGCCAGCATTT CCATATAATAGCC-3′ (SEQ ID NO: 6) and SMN2Δ7 mRNA probe: 5′-6FAM-TACATGAGTGGCTATCATACT-MGBNFQ-3′ (SEQ ID NO: 7).

[0483] Total SMN2 mRNAs were measured using a commercial gene expression assay (cat #Hs00165806_ml). Fold changes in SMN2 and SMN2Δ7 transcripts were calculated and normalized to untreated fibroblasts expression levels.

### Results

[0484] SNA-ASO, Au-SNAs and linear oligonucleotides consisting of the spinraza or control sequence were tested in SMA patient fibroblasts. SNAs were tested at 5, 1 and 0.2 μM, while linear cholesterol or distearyl oligonucleotides were tested at 1 μM. Fibroblasts were treated for 48 hours prior to processing.

[0485] Data are included in FIG. 31A (SNA-ASO and Au-SNA: Full-length SMN2 mRNA) and FIG. 31B (SNA-ASO and Au-SNA: Δ7 SMN2 mRNA). All SNAs that contained the spinraza sequence showed SMN2 exon 7 inclusion and an associated SMN2Δ7 transcript reduction. In general, SNA-ASO outperformed Au-SNAs but compound efficacy varied. SNAs with 3′ distearyl or cholesterol showed approximately a 2-2.5-fold increase in full-length SMN2 mRNA relative to untreated at the highest concentration. In comparison, monothiol and dithiol Au-SNAs only produced a 1.5-fold increase. SNA-ASOs also showed greater reduction in SMN2Δ7 mRNA as expected. Linear versions of the cholesterol/distearyl oligonucleotides caused SMN2 exon 7 inclusion and Δ7 reduction, but showed reduced activity compared to SNAs. This is evident in FIG. 31B where greater SMN2Δ7 reduction was seen with the SNA compared to the linear oligonucleotides at 1 μM.

### Conclusion

[0486] It was previously shown that SNA-ASOs containing the spinraza sequence modified at the 3′ end with cholesterol were able to cause SMN2 exon 7 inclusion in patient fibroblasts. In the current study, a SNA-ASO containing the distearyl-modified oligonucleotide and two different Au-SNAs consisting of oligonucleotides covalently attached to gold nanoparticles also showed splice-switching activity. SNAs with distearyl or thiol modifications had different efficacies but the SNA with the cholesterol-modified oligonucleotide outperformed both. Differences in the bond strength between the oligonucleotide modification and SNA core may have played a role. This is the first indication that liposomal SNAs containing distearyl-modified oligonucleotides and gold SNAs are able to target the 1SS-N1 region of the SMN2 pre-mRNA in the nucleus. Cholesterol-modified oligonucleotide consisting spinraza sequence also showed similar level of full-length SMN2 expression as the same oligonucleotide in SNA. Surprisingly, the SNA version showed greater reduction in the Δ7 variant of SMN2 mRNA compared to cholesterol-modified oligonucleotide.

### SEQUENCES

TABLE 13
Nucleic acid and amino acid sequences of genes, mRNA and protein variants of
IL17RA, REST, IL1RAP, and STAT3

| | | NCBI Reference |
|---|---|---|
| SEQ ID NO: | Name | Sequence |
| 91 | Homo sapiens IL17RA, RefSeqGene | NG_028257.1 |
| | (LRG_355) on Chromosome 22 | |
| 92 | Homo sapiens IL17RA, transcript variant 1, mRNA | NM_014339.6 |
| 93 | Homo sapiens IL17RA, transcript variant 2, mRNA | NM_001289905.1 |
| 94 | Homo sapiens IL17RA isoform 1 precursor | NP_055154.3 |
| 95 | Homo sapiens IL17RA isoform 2 precursor | NP_001276834.1 |
| 96 | Homo sapiens REST, RefSeqGene on chromosome 4 | NG_029447.1 |
| 97 | Homo sapiens REST, transcript variant 1, mRNA | NM_005612.5 |
| 98 | Homo sapiens REST, transcript variant 2, mRNA | NM_001193508.1 |
| 99 | Homo sapiens REST, transcript variant 3, mRNA | NM_001363453.2 |
| 100 | PREDICTED: Homo sapiens REST, | XM_017008527.1 |
| | transcript variant X2, mRNA | |
| 101 | Homo sapiens REST | NP_005603.3 |
| 102 | Homo sapiens REST isoform X2 | XP_016864016.1 |
| 103 | Homo sapiens IL1RAP, RefSeqGene on chromosome 3 | NG_029105.2 |
| 104 | Homo sapiens IL1RAP, transcript variant 1, mRNA | NM_002182.4 |
| 105 | Homo sapiens IL1RAP, transcript variant 5, mRNA | NM_001167930.2 |
| 106 | Homo sapiens IL1RAP, transcript variant 8, mRNA | NM_001364880.2 |
| 107 | Homo sapiens IL1RAP isoform 1 precursor | NP_002173.1 |
| 108 | Homo sapiens IL1RAP isoform 2 precursor | NP_001161402.1 |
| 109 | Homo sapiens IL1RAP isoform 3 precursor | UniProtKB: |
| | | Q9NPH3-3 |
| 110 | Homo sapiens IL1RAP isoform 4 precursor | NP_001351809.1 |
| 111 | Homo sapiens IL1RAP isoform 4 precursor | UniProtKB: |
| | | Q9NPH3-5 |
| 112 | Homo sapiens STAT3, RefSeqGene | NG_007370.1 |
| | (LRG_112) on chromosome 17 | |
| 113 | Homo sapiens STAT3 isoform 1, | NM_001369512.1 |
| | transcript variant 4, mRNA | |
| 114 | Homo sapiens STAT3 isoform 2, | NM_001369514.1 |
| | transcript variant 6, mRNA | |
| 115 | Homo sapiens STAT3 isoform 3, | NM_001369517.1 |
| | transcript variant 8, mRNA | |
| 116 | Homo sapiens STAT3 isoform 1 | NP_001356441.1 |
| 117 | Homo sapiens STAT3 isoform 2 | NP_001356443.1 |
| 118 | Homo sapiens STAT3 isoform 3 | NP_001356446.1 |

Homo sapiens REST isoform X2
NCB1 Reference Sequence: XP_016864016.1
1069 aa
(SEQ ID NO: 102)

| | |
|---|---|
| 1 | MATQVMGQSS GGGGLFTSSG NIGMALPNDM YDLHDLSKAE |
| | LAAPQLIMLA NVALTGEVNG |
| 61 | SCCDYLVGEE RQMAELMPVG DNNFSDSEEG EGLEESADIK |
| | GEPHGLENME LRSLELSVVE |
| 121 | PQPVFEASGA PDIYSSNKDL PPETPGAEDK GKSSKTKPFR |
| | CKPCQYEAES EEQFVHHIRV |
| 181 | HSAKKFFVEE SAEKQAKARE SGSSTAEEGD FSKGPIRCDR |
| | CGYNTNRYDH YTAHLKHHTR |
| 241 | AGDNERVYKC IICTYTTVSE YHWRKHLRNH FPRKVYTCGK |
| | CNYFSDRKNN YVQHVRTHTG |
| 301 | EKPFKCDQCS YVASNQHEVT RHARQVHNGP KPLNCPHCDY |
| | KTADRSNFKK HVELHVNPRQ |
| 361 | FNCPVCDYAA SKKCNLQYHF KSKHPTCPNK TMDVSKVKLK |
| | KTKKREADLP DNITNEKTEI |
| 421 | EQTKIKGDVA GKKNEKSVKA EKRDVSKEKK PSNNVSVIQV |
| | TTRTRKSVTE VKEMDVHTG3 |
| 481 | NSEKFSKTKK SKRKLEVDSH SLHGPVNDEE SSTKKKKKVE |
| | SKSKNNSQEV PKGDSKVEEN |
| 541 | KKQNTCMKKS TKKKTLKNKS SKKSSKPPQK EPVEKGSAQM |
| | DPPQMGPAPT EAVQKGPVQV |
| 601 | EPPPPMEHAQ MEGAQIRPAP DEPVQMEVVQ EGPAQKELLP |
| | PVEPAQMVGA QIVLAHMELP |
| 661 | PPMETAQTEV AQMGPAPMEP AQMEVAQVES APMQVVQKEP |
| | VQMELSPPME VVQKEPVQIE |
| 721 | LSPPMEVVQK EPVKIELSPP LEVVQKEPVQ MELSPPMGVV |
| | QKEPAQREPP PPREPPLHME |
| 781 | PISKKPPLRK DKKEKSNMQS ERARKEQVLI EVGLVPVKDS |
| | WLLKESVSTE DLSPPSPPLP |
| 841 | KENLREEASG DQKLLNTGEG NKEAPLQKVG AEEADESLPG |
| | LAANINESTH ISSSGQNLNT |
| 901 | PEGETLNGKE QTDSIVCEMK MDTDQNTREN LTGINSTVEE |
| | PVSPMLPPSA VEEREAVSKT |
| 961 | ALASPPATMA ANESQEIDED EGIHSHEGSD LSDNMSEGSD |
| | DSGLHGARPV PQESSRKNAK |
| 1021 | EALAVKAAKG DFVCIFCDRS FRKGKDYSKH LNRHLVNVYY |
| | LEEAAQGQE |

### EQUIVALENTS

[0488] Those skilled in the art will recognize, or be able to ascertain using no more than routine experimentation, many equivalents to the specific embodiments of the invention described herein. Such equivalents are intended to be encompassed by the following claims.

[0489] All references, including patent documents, disclosed herein are incorporated by reference in their entirety.

The application's sequence listing, which the Patent Office published only in electronic form, follows.

SEQUENCE LISTING (215 sequences)

SEQ ID NO: 1 - DNA, 18 bp, Artificial Sequence
  Synthetic
  misc_feature (18)..(18): modified with two hexaethylene glycol spacers
  misc_feature (18)..(18): modified with triethylene glycol bound to a cholesterol
tcactttcataatgctgg

SEQ ID NO: 2 - DNA, 24 bp, Artificial Sequence
  Synthetic
gctgatgctttgggaagtatgtta

SEQ ID NO: 3 - DNA, 25 bp, Artificial Sequence
  Synthetic
caccttccttctttttgattttgtc

SEQ ID NO: 4 - DNA, 22 bp, Artificial Sequence
  Synthetic
  misc_feature (1)..(1): modified with 6-carboxyfluorescein
  misc_feature (22)..(22): modified with minor groove binder non-fluorescent quencher
tacatgagtggctatcatactt

SEQ ID NO: 5 - DNA, 20 bp, Artificial Sequence
  Synthetic
tggaccaccaataattcccc

SEQ ID NO: 6 - DNA, 25 bp, Artificial Sequence
  Synthetic
atgccagcatttccatataatagcc

SEQ ID NO: 7 - DNA, 21 bp, Artificial Sequence
  Synthetic
  misc_feature (1)..(1): modified with 6-carboxyfluorescein
  misc_feature (21)..(21): modified with minor groove binder non-fluorescent quencher
tacatgagtggctatcatact

SEQ ID NO: 8 - DNA, 1613 bp, Homo sapiens
agtaattaaaagtgtagtactgacatcaatatacactaatagacaatgtaacagaattgagagtcagaaatagccctgtgatatatgtgactgattttaactaaagttacaaatgtggtttaatagagaaagcatagtagtttcaagaaatggtggtaaaactattggaaatccttatgcaaaaacaaaccaaatttccacctacactgagccacatataagaattaatacaaaatggattacagacctaagtgtaaaactaaaactctaaactgtgtaaaaaaaaaaaagagagaaaaatctgtgatcatggattgcctataacaaaagaacaaactgaaatggccttgttgcctggggtggcacccgaggttcttggtctcacgctgaggaaatcaaggacgctgacacaccaagggtgtgaggctagagcagaagtttaataggcaaaagaaagagactagctctctcctgcagagagaggtcctgaaaagagttcccattccacagtgaaatgcaagcatttttataaatgagctaatgggaagggggtagcttatctacacatagggagcaaaaaaccagttaggaccaggtgttgccatctgcacagagcgtgaatctctggcatcccccaccccaaccttttattatgcaggcaggtccttggcctgagctactccacattgcttatctctttcctattgtgcatgtgctaaataaggggaggtggagccaccatggtggacatgcctggccccaggtacccctttctctccgtgcagctgcaggcaaccccaacaactcacaacatgcaagcttccagcttccttatctgagtatgtactaaggtccactgtgtttacttcacatactgtgtttacttcacatacccaccttacgtatgtgaagcttgctgattacccaggaagctccccctctgtgccagagctgcttccttatacatgtttacagcccgatcttccaggctgctccttgttagaagagaagtgatttcttgggctgctttttgttagaagggaagttctaccgaggactctgtctaactatcggcttacctagtctttttttacctcctctctcaaaaccatcaaagaaaaaactgaaaaattagatttcagcaaaattaagattttctgttcttaaaaagacgttgttaacaaaatgaaaaaccaaagtgtaaaccgggagaaaatacatgcaagttacctatctgataaagatattgtacccagcaaacatgaagaactctcaaacctcaacaacaaaaaaattcaattaaaagatgggtaagttggccgggtgcagtggctcatacttgcaatcccaatctttgggaggctgaggcaggaagattgcttgagcccaggagttcacgacaagcccaggcaacataatgagaccttgtttctacaaaattttaaaaaattagccaggcattgtggcgtgtgctcgtaatttcagctactcagaaggctgagacaagaagactgagcgcaggaggtggaggctgcagtaggctgtgtgattgcaccactgcacaacagcctgggtgacagagtgagacactgtctccaaaaaaaaaaaaaaaa

SEQ ID NO: 9 - DNA, 18 bp, Artificial Sequence
  Synthetic
ctcattgttgtttaccat

SEQ ID NO: 10 - DNA, 77 bp, Artificial Sequence
  Synthetic
ctatatatagatagctttatatggatgttaaaaagcattttgtttcacaagacattttacttattttattcaacaaa

SEQ ID NO: 11 - DNA, 18 bp, Artificial Sequence
  Synthetic
atggtaaacaacaatgag

SEQ ID NO: 12 - DNA, 28073 bp, Homo sapiens
ccacaaatgtgggagggcgataaccactcgtagaaagcgtgagaagttactacaagcggtcctcccggccaccgtactgttccgctcccagaagccccgggcggcggaagtcgtcactcttaagaagggacggggccccacgctgcgcacccgcgggtttgctatggcgatgagcagcggcggcagtggtggcggcgtcccggagcaggaggattccgtgctgttccggcgcggcacaggccaggtgaggtcgcagccagtgcagtctccctattagcgctctcagcacccttcttccggcccaactctccttccgcagcctcgggacagcatcaagtcgatccgctcactggagttgtggtccgcgtttttctacgtcttttcccactccgttccctgcgaaccacatccgcaagctccttcctcgagcagtttgggctccttgatagcgttgagtggaggccctgccgcgacttggcagtagcttattttgttcactcctctctggctggtgtgggggaggtgggggcattaggccagggtgaagcaggggaaccacttaggagtctgttaagatgatctgaacttcagaacaagatgttattaacagagtgaaagtatttggattctgggtatattttgaaatcggaggcaacaggtttttcagatagattcgataacggaggttatcctgaatagttgaaaagataaagttgccttttgctgaggtgggaaagagaagattgccagtagagcaggtttctcaggagttcagtcttgggcatagcatggtaggggtgaatttggctggagtgagttggagagtaggagaagagaaatccaaggcaacatttgaccagcctgggcaacatagtgtgactccgagtctgcaaaaattagacgggtgttgtggtgcgcgtctgtggtctcagctacctggaaggttcaggccttggaaggctcagggaggtggaggctgcagtgatctgtgattgcgcctctgcactccagcctgggcgacagagccagaccctgtcttaaaacaaaataaacggccgggcgcggtggctcaagcctgtaatcccagcactttgggaggccgaggcggccggatcacaaggtcaggagatcgagaccatcctggctaacacggtgaaaccccgtctctactacaaatacaaaaaattagccgggcgtggtgacgggcgcctgtagtcccagctactcgggaggctgaggcaggagaatgtcatgaagccgggaggcggagcttgcagtgagccgagatcgcgccactgcactccagcctgggcgatagagcaagactccgtctcaaataaataaataaataaataaataaataataaaaacatcggtaggcatatttcaaggaattctatttaaaaaaaatttttttagagacaagttcgctctctgtggcccaggctggagtacagtggcatgatcctagcccatggcagcgttgatctcttggcctcaagcgaccctcctttggagtcgctgggcctaaaggagtgagccaccacgaaattttattataaatggagggtagagaaattgggcaataaatggagggggaagtgagttaagaggaattttaattatgtgtgtgtggttttaaaagaggggggtcttgctctgttgcccaggctgctggggtgccagtggcgcaatcatgaatcactacagccttggactcctggcctcaagctatcctcccacctctgcctcccaaagtactgggattactagtgtgagccactgcactaagataggagcaacatgtttcagcatgtttgtgggttgataggaaagatgagaatgggaaagttgatgtcggaaagaagacaatggctagagcaatgtcctagagtaggtaagaagggatggatttggcctttgttggaaacattagcggttcttttggtgacagctatatagttaacacatctatgatacgtgaatgggcagataggatggcaggagattttgaaagttctcttgattcttactgttctcttagtgaaagaagcaaggttatcagctagaagctgggatgggagaggaaagagaagatgggaagtagatagttctttagaagagtgggcaagggttggactagggaagtttagtggaaatattgctaggcaacataaagagcctacttgagattcgtggtcatgagttgaaggagaccagacagcaagattgtgtatgagggcacccacagagtaaatggagagttgaaattaatgcagttgtgattttaccacgtggatatgaagaagtgagggggagaagtacaaaggagttctcttaatgattgaccatggaatttaagctggctaagaaaggaagtgagaggccgggcgcggtggctcacgcctgtaatcccagcactttgggagactgaggtgggtggattacctgaggtcaggagtttgagaccaacctggccgatatggcgaaaccccatctctaataaaaatacagaaaaattagccgggaatggtggcaggtgcctgtaatcccagctactcaagaggctgtggcaggagtatcccttggacccaggaggtggaggttgcagtgagccgagatcacgccactgtactccagcctggacgatatagtgagacttcacctcaaaaaaaaaaaaaaagaaaggaagtgaggattttaagaccctgagagacagtttaaaaagtgggaggatcggccgggcgctgtggctgacacctgtaatcccagcactttgggaggccgagttgggcagatcacaaggtcaggagttcgagaccagcctggccaatatggtgaaaccttgtctctactaaaaatacaaaaattagccgggcatggtgtcacgtgtctataatcccagctactcgggaggctgaggcagaaaaattgcttgaacctgggaggcagaggttgcagacagctgagatcactccattgcactccagcctgggcaacaagagcaaaactttgtctttaaaaaaaaaaaaaaaaaaagaatacaaaaattagccgggcgtggtggcgcgtgcctataatcccagctacttgggaggctgaggcaggagaatcagttgaacacgggaggcgaggtttgcagtgagccgagattgcgccactgcactccagcctgggcgacagagcaggactcctcttggaaaaaaaaaattagctgggcatggtggcaggtgcctgtagtctcagctactagggaggctgaggcaggaaaatcacttgaacccgggatgtggagtttgcagtgacccgagatcgtgccactgtactccatcctgggcgacaaaatgagactctgcctcaaaaaaaaaaaaaaaaaaaagtgggaggatcaatgtactgccagtcctaatgaagtggaatgattgtccccatcaaatcactagtaggagtaagttgcagagcctagaaggtgatggttaagagagtgggattcttgaaactgcatttatggagaggttgtggttattggttataataaataaatacagttgaagtgagtgagtagctgagatttggggatgtatcagttcattcttacactgctacaaagacatacctgagaccaggtatttataaagataagaggtttaatcagctcacagttctgctgcctgtacaggcttctcttgtggaggcctaaggaaacttacagtcatggtggaaggtgaaggggaaacaagcacagtcttcacatggccagcaggagagagagagaagggggaagtgctacatactttaaaacaaccagatcttgtgagaacgcttatcaggaaacagcacttggggatggtgctaaatcattagaaatcacccccatgatccagtcgcctcctaccatgcccacctccaacactggggatcacaattcagcatgagatttgggtaggaacacagagctgcaccacatcagaggatgtacaagattgtggtggagaggagtttagagacctgcaaatatagggtaattgaagggatcatctacatggatatttaaatcaccaaaaattatgacaggagtagtgttggagagagaactgcgatgtaaacattaaggaatgaggaagagtgactcggtaggctgtaggtgactgcaataggaaacgataatagactgtgagtctggtgacaagattttccttctttctttttttccccccccccgagacagggcctctttttgttgcccaggtgggagtgcagtggcgcgatcacggctcactacaacctcctcccaagctcaagggattctcccacttcagcctctcaagtagctggaactacaggtgctgaccaccatgcctggctactttttgtcaggattttcaaggctgggaattttgagaggggaatggaggagaataatctgaaagtgcaagtaaggagcagggaagatttcttttttcttttttttttttttttttgagtcggagtctggctcagtcgcccaggctggagtgcagtggcgagatctccgctcactgcaagctccgcctcccgtgttcacgccattctcctccttcagcctcccgagtagctgggactacaggcgcccgccaccacgcccagctaattgtttttttgtatttttagtagagacggggtttcaccgtgttagccaggatggtctcaatctcctgactttgtgatccgcccaccccggcctcccaaagcgcttgggattacaggcgtgagccaccgcgccagccagagcagggaagatttcttccccacatctccagtaggtacagtgatatgaagtgtgtggaggagaaaagaggaaacatctatcatttgagatggctgcgaaaggaaaaggcatcctcagggagctagattttacttagagcaagaaatgaagggatgattcagaggttaaaagagtggattttatgaattactcaagggagcacagtggaagtttcaggaagtggtaggagaaggtagaagatggcagggtgttgggaataatttgagaaatctgagctactggaaatgactgagaatcagatataaaggcagtcctggtggtccgttctggctgccgttgctgtgtaacgaatctgccaaaacttagtggcttgaaacaacaaagaacattttattatctctcattgtttctgtgggttaggaatttgtgagagccgtgctgggcagttttcgtgcggctgtctcgtggttgcacctacatagttgctagagctacagtagctggggactgagcagctagggattggcaggctatctctttttttcatgtagtctcatgaagatttctttatgtggtttcaatgtgtgggctggtttggatttccttatagcatggtggcctcagttggattgctgttttgtgatccttttcatccctccttgtcctgtccccagacaaccactgatctactttctgtcaccatagattagcctgcatttttaagaatttttataaacgtggaatgatagagtaccttttttgtcacgtttcttttatttatcatagctattttgattttcatccattttattgctgagtagtatcccattgcatgtatatactatactgtattcattcgcttgcttgtgaacatttgggctttttccagtttgggactgttaacaagtagagccactatgaatattagtgtataagacttcatatagccaaggctggcagatcgcttgagcccaggagtttgagaccagcctgggaaacatggtgaaacctctatttttattttaaaatcaaaaattaaaaattttctataaaaaattttaaagaagactttgtatagacatacgctttcatttttcttgagtgaatacttaggtctcagggtagatgtattttaagtctttaaggagctgtcaaactcttcctcaaagtggtggttgtaccatgttactttttaatataacagagattaattgagcaaagaaaaattcaaaagttggacagcccccacaactaaataggttcagaacagctcccccattttgcattttgaccagcaatgtatgaaagttccatttgctcagtgtccctgcaaacacctggtatggtcagtctttttaattttaggcattataatagatatagtggcttcttgtgattttaattagcatttcctaatgaccagtgctgctgttgatcatttcatgagtgtatttgccatccgtatatcttttttggtgaagtgtctattcaaatcatttgggttttttttttttttgttttttttttttggagacagtgtctcactctgtcacccaggctgttgtgcagtggtgcaatcacacagcctactgcagcctccacctcctgcgctcagtcttcttgtctcagccttctgagtagctgaaattacgagcacacgccacaatgcctggctaattttttaaaattttgtagaaacaaggtctcattatgttgcctgggcttgtcgtgaactcctgggctcaagcaatcttcctgcctcagcctcccaaagattgggattgcaagtatgagccactgcacccggccaacttacccatcttttaattgaatttttttgttgttgaggtttgagagttcttcatgtttgctgggtacaatatctttatcagataggtaacttgcatgtattttctcccggtttacactttggtttttcattttgttaacaacgtctttttaagaacagaaaatcttaattttgctgaaatctaatttttcagttttttctttgatggttttgagagaggaggtaaaaaaagactaggtaagccgatagttagacagagtcctcggtagaacttcccttctaacaaaaagcagcccaagaaatcacttctcttctaacaaggagcagcctggaagatcgggctgtaaacatgtataaggaagcagctctggcacagagggggagcttcctgggtaatcagcaagcttcacatacgtaaggtgggtatgtgaagtaaacacagtatgtgaagtaaacacagtggaccttagtacatactcagataaggaagctggaagcttgcatgttgtgagttgttggggttgcctgcagctgcacggagagaaaggggtacctggggccaggcatgtccaccatggtggctccacctccccttatttagcacatgcacaataggaaagagataagcaatgtggagtagctcaggccaaggacctgcctgcataataaaaggttggggtgggggatgccagagattcacgctctgtgcagatggcaacacctggtcctaactggttttttgctccctatgtgtagataagctacccccttcccattagctcatttataaaaatgcttgcatttcactgtggaatgggaactcttttcaggacctctctctgcaggagagagctagtctctttcttttgcctattaaacttctgctctagcctcacacccttggtgtgtcagcgtccttgatttcctcagcgtgagaccaagaacctcgggtgccaccccaggcaacaaggccatttcagtttgttcttttgttataggcaatccatgatcacagatttttctctcttttttttttttacacagtttagagttttagttttacacttaggtctgtaatccattttgtattaattcttatatgtggctcagtgtaggtggaaatttggtttgtttttgcataaggatttccaatagttttaccaccatttcttgaaactactatgctttctctattaaaccacatttgtaactttagttaaaatcagtcacatatatcacagggctatttctgactctcaattctgttacattgtctattagtgtatattgatgtcagtactacacttttaattactattgcttcagggtatgtcttgtaaaccaaaaataaaattataggccccccccgcccctgcacaaccaactgaatggacccatcctctcagccaagggcattccaaaattaacctgaaaaactagttcaagccatgatgggaagggggagttggacatgtctcatcacaccctactaccttttggaattactgatagaacagactcttaaagtctgaaaagaaacatttacaacctaccctctctgaagcctgctacctgggagcttcatctgcatgataaaaccttggtctccacaaccccttatggtaacccaaacattcctttctgttgataataactctttcaactagttgccaattagaaaatctttaaatcttcctatgacctagaaacctccctacccccactttgagttgtcctgcctttcctgacagaactcatgtacatcttacatatattgattgatgcctcatgtctccctaaaatgtataaaacaaagctgtaccccaccaccttggggacatgtcatcaggacctcctgtggctgtgtcataggagcgtctttaactttggcaaaataaactttctaaattgattgaaacctgtcttagctacttctggtttacagtcttaaagttagataatgtaaattgtccagctttggtttatttttgtccttagtagttccatataaattttagaatcagcttttcaatttaatacactactttcctcttagatccacaattaaatatatttgatgctaacaattctgttttatgtttttcgttttttttttttgagacaagagtttcgctcttgttgcccaggctggagtgcagtggcgcgatcttggctcaccacaacctccacctcccaggttcaagcaattcttctgcctcagcctcccgagtagctgggattacaggcatgcgccaccacgcccggctaattttgtatttttagtagagacggggtttcaccatgttgatcaggctggtcttgaactcctgacctcaggtgatccacccacctcggcctcccaaagtgttgggattacaggcgtgaaccaccatgcctggccagttctgttatttttaaaacccaagtttccctggtcatatcttggttggatgaagcgtattttcaatagattaccctggaaaggctagtgagtacggtattcttctacattttagacttttcttagtcttgctacttcaaggacagctaggctgcatataaaattcttggctcatactttttccccataaatttctatgagaaagtctaatgataactgattttctttattttgtaacttagtctttttgcttagaggctctctgaggatgggagggggttcttcctcccatccctaggaatttttcttttttttaaattcctaatcactagaccaccaggaagattgtttgttttgttttgtttttattcttcagggaccccatttatacatacgttaaataaatactgtttgccaatgtatcaaccattttgcttcttatttatttttgttcctttggttctttttcatggctttgctttggtgctccttagattttcagtcagatgtatttgtccttgggtaccttgtaatcagtattaccttttcttctgtcgctttgttttctgttcgttttgaaattacttgtttcctggtctggcaataacagttgagatatgaggagtttgagctgccatctgtctatgtatcttgctttaagactgcactcttctattgatatcactggccttgattttgtgatttctttatttcttcaggaccacccttcattttctactgtttgcttcctttttttttgagatggagtctcactctgtcactcaggctggagtgcagtgatcttggctcattgcaacctctgcctcccgggttccagcaattctcctgcctcagcctcccaagtatctgggactacaggtgtgcaccaccatgcccggctaagttttgtatttttaatagagacggggttttgccacattggcaggctggtctcaaactcctgatgtcaagtgatccacccaccccacccacctctgcatcccaaagtgctgggattacaggaatgagctgccgtgcccagcctcccccctacccccctttttttctttcgagacagagattataggtgtgagccactggacccagcctgtttttattccttttaccaaatctccaaggaatatcttcccttccaagtgcgaatgtaaccttaagtcagttaacctctttgtgattacttttcttatctgcaaagtgacttaatgatcttaagtactttttttttttgagacagggtctcactgtcaccctggctggagtgcagtggcacgatctctgatctccactcactgcaatctcctcttccctggttcaagcggccctcccaccttagccttctgggtagctgggactacagatgtgaaccaccacgcccagctaatttttgtactttttgtagagatggggttttgccatgttgcccaggctgggattattaagtactttttatcatacagcaagattgacattttatattggaatacatttgtctctatataacggagattaacaggaaaatgacaagcctgggtgcggtggctcatgcctgtaatcccagcactttgggaggctgaggtgggaggatcacttgaggtcaggagttcgagaccagttttgccaagatgatgaaagcccatgtctactaaaaatacaaaaattagcccagcttgatggtgggcgcctataatcccagctatttgagagactgaggcaggagaatcacttgaacctgggcagcagaggttgcagtgagccgagatcatgccactgcactccagcctgggtggcatagcgagactcttgtctcaagagaaaacaaaacaaaacaaaaaaaaaacaggaaaatgacaaaaagtaatattacaactcagtgaattttataacaaacttttttggaattcattgactaatactataccaaatccaaaatactctctagtataccaaatccaactctaccctatagtataaattggattctatttggacttgtctcactaatccctcatacagtgtgttttattttttattgaagtaaaaaaatttgtcattttaaccatttttaagtatatagttcagtaatattaagtatgttcatgttgttgcgcaatagatcttcggaagtttttcgtcttgcaacctgaaactctacccattagcaaattcccatttctccttacacttagcccttggtaatcatcattcttttttttttttttttgagatggagttttactcttgttgcccaggctggagtgcaatggtgcaatctcgactcaccacaacctccgcctcccaggttcaagcaattctacctcagcctcccgagtagctgggattacagtcatgcaccaccacgcccggctaattttgtatttttagtagagaaggggtttctccatgttgaggctggtctcgaactcctgacctcaggtgatctgcccacctcggcctcccaaagtgctgggattacaggcgtgagccactgcgcctggcccattctttctaattctataaatttgactacttagttaccttacataaataaattcttatagttagtgttatttttgcttccatgccttttttgttgttgttcatgctcttacttggaatgcgttctattttgtctacctatgcacatcctgttgggttttttttttttttgggggttttttttgtttttttttgtttttttttcccagacaaggtctcaatttgttacccaggctggagtgcagcggcgccatctccactcactgcatcctcaacttcctgggcccaggtgatcctctcgcctcagcccctgcaggtagctgggactataggcatgtgccaccatgcccagctaaatttggtttttttgtttgtttgtttttgagacagagtctcactctgtcacccaggctggagtgcagtggcacaatctcagctcactgcaatctctgccgcccgggttcaagtgattctcctgcctcagcctcccaagcagctgggattacaggtgactgccaccacgccagctaagttttgtagttttagtagagatggggtttcaccttgttggccatgctggtctcgaactcctgacctcgtgatctgcctgcttctgcctcccaaagtgctggaattacaggcatgagccaccacgcccggccagaatttttgtatttttagtagacacaaggttcttaccctgttgcctaggctggtctggaagtcctggactcaagcaattcacctgccttggcctcccaaaatgctgggattacaagccaccatgcccggcctaaatcctgttgttttgttttgttttattttgttttgttttgttttgtttgttttttgagacagagtctcgctatgtctctcaggctgtagtgcagtggcgcgatcttggctcactgccacctctgcctcccaggttcaagtgattctcctgcctcagcctcccaagtagctgggattacaggcatgtgctactatgtccggctaatttttgtatttttagtagagacagggtttcaccatgttggccaggctggtctcgaactcctgacctcgtgatccacccacctcggccacccaaagtgctgggattacaggcgtgagtggtttttatttcttaggccggtttcctccatatgatcttgcagtagacattaatttctttcctttttaattaaaatactgtttgtatttcacattttgatgtttgttaagatttgttttatattgttttttgttttgtcttgtgtgatagtcttaaatccctagttagataataactggagagtaccatgtttctatatatctctcagtgacttgcacagtgctagcagatagtgctaaaaaattatttattattattattattttgttattgttgttgttgttgttagacagggtcttcctctgtcacccaggctagagggcaatgggatgatcatagcttactgcagcctccaacaactgggctcatgtaattctcctgcctcagcttcccaagtagctgggattacaggcatgagccaccatgtctggacaaaaatatttccaggtgcagtggctcatgcctgtaattcccacacttgggaggccgagcgaggctggaggatcacttgagcctaggagttcaagaccagcttggctaagatggcgagaccccgtccctacaaaaaattttaaaaactagccaggcatggtggcatgcacctatattcccaactactcagtgggctgaggtgggagggtcatttgaacacaggaatttgaggggagaaaaaaagaagagagaaagagaagtgaaggaaggaagaaaggaaggagggagggagagaagaaagaaacgaaagaaaggaaaagaaaaggaaggaaagaaaattggtaccaggaaagcaggaaagggaaatggaagtaaaaaaataataataataataaaatgaaaattggttagtcactattaacaatttgtatccttataatctggaaacattataatttcaaaagaaaaaatattctttggatcataggttctgaggtcagaacagcattcccgtagtctagatgaagtcaagttttatctgatcttaattgaaataaatatagctggccttgaacaaatctactcatggtatgtggataggaattaaattgtaggggcattcacttgatggcattcattcttagaacatttacctatgtctagcttttggagtaaagtcacataacctctaaccaggtaagtttcctgtggctttatttaggattttaaatactcattttcagtgtaattttgttatgtgtggattaagatgactcttggtactaacatacattttctgattaaacctatctgaacatgagttgtttttatttcttaccctttccagagcgatgattctgacatttgggatgatacagcactgataaaagcatatgataaagctgtggcttcatttaaggtatgaaatgcttgcttagtcgttttcttattttctcgttattcatttggaaaggaattgataacatacgataaagtgttaaagtacatgttattcagttttcattttgaagattagatggtagtatgagttagttaaatcaggtgatatcctcctttagaagttgatagcctatatatgtcatcctttgtggaggcaatttaaataaaatttaaaacatttattcctggctgggtatggtggctcactcctgtaatcccagcactttgagaggctgaggcgggtggatcacctgaggtcaggagtttgagaccagcctggccaacatggtgaaaccccgtctttactaaaaatacaaaaattagccaagcatggtggcacgtgcctgtaatcccagctgcttgggacactgaggcaggagaattgcttgaacctggggggcagaggttgcaatgattgcaccactgcactccagcctgggcgatagagtgagactccatctcagaaaacgaacaaacaatgtattccttttagtatttttacattgtatcaaactatggaagtcctctaattgagattaataagaaaaagacaatctgaattataattttaaacatttaacaagcatgtagtaaaataatgatgaagataaatagcattagtacagcaattaatatttgtagcatgctgacagtgctctgtgtgcgtttcatatattaaattactctaatcatcccaaatcctgtaagttgggtatcaattcaagtgttcctattgggtaggaatatacagttcttttaggaaatgtagtatggttctgtgtctcaaacaggacacttacacagttggccaacatcatcaccttctccattctctgagatgtttagtcttactgagcactaaatatgggtcatcaatagtccagactaccttgagcaaacaatagtccagactaccttgagcaaacagagcatatactcatacagtgtataaagagcaccaagcatacagatttcatgtctttctcatagttactcttgtaacatgagctaaagatcagacctctatgtcacctttgtaactgatttctagatttttttttttttttgagatggggtcttgccctgtcacccaggctggagtgtagtggcgtgatcatgcctcattggagccttcaactcatgagctcaaacaatcctcctacctcagcttcctgagtagttgggaccacaggtgtgtgccaccacacccagctcatttttgtattctttgtagagatgcagtctcaccctgttgcccacgctggcctggaactcctgagctcaaaagatccctccgccttgaccttccaaagtgctgggattacaagcatgaaccactgcacccggcctagatttttaaatgtgctttccagtatacactgaaactagaagtcgactaaagaattaccaagagaattctataaaatagagattgaaatggggctcgatgtgggatgggttggtgatattgcagggagaagtaatctgagtaaaggaggaaaagaactgatttgggaaaacgatagttttagtagtgagtttgagtatgaattaagttgagattgaatttgaattaagttgaggttgaatatgaattaagttgaggttgagtttgaggtatgaattaagatgtgaaattgatcattggaaatgttagattgagaaaagtcacagctggattaatagcttcagaagtgtgtttgcagacagttgcaactaaagtaataagaatagatggccttggccgggcgcggtggctcacgcctgtaatcccagtactttgggaggctgaggcgagcaaatcacgaggtcaggagttcaagaccagcctggcccacatggtgaaaccccgtctttattaaaaatacaaaaattagctgtgcacagtggtgcacgcctgtaatcccagctactcgggaggctgagacaggagaatcgcttgaacctgggaggtggaggttgcagtgagctgagatcagtgtgactgcactccagcccggtgacagagtgagactctgtgtaaaaaaataaaataaataaaataatggccgtaagcaagtaaagaaggatggccagctcttattgggaatgcctaaatctaaggcttgatcagaagtaatgaaaccgttggggccctacattgctatgacatccaaagggccatgaatatcaggaagaaagataattaacagggtctaatgttacagagaggttgagagcaaggagatttgattaaaagggtctttagagctgatgtcaggtgtatgatgcctttaagagcagtttttatagtgcagggggtggtcaaaagagaaaataggtgctttctgaggtgacggagccttgagactagcttatagtagtaactgggttatgtcgtgacttttattctgtgcaccaccctgtaacatgtacatttttattcctattttcgtagcatgctctaaagaatggtgacatttgtgaaacttcgggtaaaccaaaaaccacacctaaaagaaaacctgctaagaagaataaaagccaaaagaagaatactgcagcttccttacaacaggttattttaaaatgttgagatttaacttcaaaggatgtctcattagtccttatttaatagtgtaaaatgtctttaacttaagtgattagtacagtgtttctattgacatatacttatacaacttcaaaaacaactattaaattttctgttatttaggaacatgcatattagtcatgaaagtataaagaattagatgggaatgataaatgctaaaatcaggacatgtgttccatttgtgaatggaaggcagggagaaggtgccgtttggaaggagtacccaagagccgtaagctgaattggcagtgttttacatcttaagctgagagatagatttttttttcccctttttctttaaaaactctaaaactgttaattccaaggaacccagaagtctaggtagattatttctgctagttaaaagcagtagtcctgaaagctgaatattttggtgtcttttgagccaactttagtttcatcattaccaagggggaagagagctaacagttgatgagcacttgctctaggccagtccagagtgctgggcaccatacgcattttatctccctcccgctattcacaacaaatatgggaggtagtttatattatagccatctaataagatggggaaactaagactcaaagagattcagaaacttgtccatgattataaatgtaagagagttggaattcagatttatgtatttagaccccaagcctttctcattacatcattttgccttccaaatctctaccctctatccttcacctccccactgatcaaaacgagatgatagtttgccctcttcaaaagaaatgtgtgcatgtatatatctttgatttcttttgtagtggaaagttggggacaaatgttctgccatttggtcagaagacggttgcatttacccagctaccattgcttcaattgattttaagagagaaacctgtgttgtggtttacactggatatggaaatagagaggagcaaaatctgtccgatctactttccccaatctgtgaagtagctaataatatagaacaaaatgctcaagaggtaaggatacaaaaaaaaaaaaattcaatttctggaagcagagactagatgagaaactgttaaacagtatacacagttgtcagtttgatccaccgaggcattaattttttcttaatcacacccttataacaaaaacctgcatattttttctttttaaagaatgaaaatgaaagccaagtttcaacagatgaaagtgagaactccaggtctcctggaaataaatcagataacatcaagcccaaatctgctccatggaactcttttctccctccaccaccccccatgccagggccaagactgggaccaggaaaggtaaaccttctatgaaagttttccagaaaatagttaatgtcgggacatttaacctctctgttaactaatttgtagctctcccatgaaacttttgtagcttaaatacacaagaattttttgaaaaggaaataagataatgatgcaaaatagttaattttttaaaaaaatgttagacactgcagtggatgcaacaaaatactttatatgaaagatttatccagttaacttttgtggagtattaggtattagactaataattagcacacttacttaagttagaaagtataataatgcgccggacgcggtagctcacgcctgtaatcccagcactttgggaggccaaggtgggcggatcacaaggtcaggagatcgagaccatcctggctaacacggtgaaaccccatctctactgaaaatacaaaaaaatttgccgggcgtgatggcgggcacctgtagtcccagctactcgggaggctgaggcaggaggatggtgtgaaccccggaggcagagcttgcagtgagtcaagatcgtgccactgcactccaacctgggcgacagaatgagactccatctcaaacaaaaaaacaaaacaaaacaaaaaaaagtgtaataataatttatcattagctggatgatatgctgttgtttcccatgtcacctgtataagatatgtaaaataagaacacattatttacatctaatatagataaaatcctgaggcgctctcagattgttttgtagagttcaaatgtaaatattgttttcatttatggtccttttggttataagtaacagaaatcaactctaaaaagatttttattataggttagattatgtcatggaaccttaaggcttgtccctttctagttcttttgtgtaaagcggtgatttcttccatggagggaatggtatttaggcaatttttttttttttttcgagatggagtcttgctctgtcgctcaggctggagtgcagtggcaccatttcagctcactgcaacttccacctcctgggttcaagtgattctcctgcttcagcctcccaagtagctgagattacaggcacccgccaccacacccggcttattttgtatttttagtagagatggggtttcaccatgttggccaggctggtcttgaactcctgacctcaagtgatctccccaccttggccttccaaagtgctaggattacaggcgcctagcctaggcagtcattttcaaaaaacaagcatgactcaccaaaagttttaagattttctgtgataatgttcttattgaggcttacattatattacagtttcttgaatctaaaatgatgtaccctcttagaatatatacatcatgcttcattggtctcagggggctgatttttataaggagagatttgctagttttcacaatatgtcctctaagttggcatgtatagctaaacaggctttcataaaaatatacaatttagttaatgaaatttgggatatagtcttttatgattgaaataattttgctaaatagactgtctctgatttattaggtaatcaccactcttattttgttttacttccttaatgtctacatagaaaggaaatgagaaaaatccagaggttgtcatttgacttatgagtctgtttgacttcaggatttggtacatgaaatttcacttaatctttttgatatgtataaaacaaatattctgggtaattatttttatccttttggttttgagtcctttttattcctatcatattgaaattggtaagttaattttcctttgaaatattccttatagccaggtctaaaattcaatggcccaccaccgccaccgccaccaccaccaccccacttactatcatgctggctgcctccatttccttctggaccaccagtaagtaaaaaagagtataggttagattttgctttcacatacaatttgataattagcagaatagaggattgtaaaatgtcattgtagaacatcccttgggccagattctaatgggtagaaatttgaactaaacctctgggttttgtttgtttttaatgcctttctgttacccagatgcagtgctcttgtagtcccaagtctaagctctaggttgccttctttcctggcagaagttggtgtctatgccataaggaggtagttcctgttagaagggatttaattataccttatataaggaattagtgtttgcccttctaggtatagttggatgttagcttctgatgtaaactggatttctttttctttctctctctttttttttttttgttttggaggcagagttttgcccttgtaccccaggctggagtgcagtggtgtgatctcagctcacagcaacctccgcctcctgggttcaagcaattctgcctcggcctcccaagtagctgggattacaggcgactgccaccacacccggctaatttttgttttattagtagagatggggtttcaccatgttggccagactgatcttgaactcctgacctcaggtgatccacccgccttggcctcccaaagcgctgggattacaggcgtgagctgccgcacccagctgtaaactggatttctaatggtagatttttaggtattaacaatagataaaaagatactttttggcatactgtgtattgggatggggttagaacaggtgttctacccaagacatttacttaaaatcgccctcgaaatgctatgtgagctgtgtgtgtgtgtgtgtgtgtgtgtgtattaaggaaaagcatgaaagtatttatgcttgattttttttttttactcatagcttcatagtggaacagatacatagtctaaatcaaaatgtttaaactttttatgtcacttgctgtcttttcgtcctcgttaaatttaattttgttggtcttttgttgttattggttggttttctccaaatgctagctatgttaagaaatttaaggccaggtacagtggctcatgcctgtaatcccggcattttagaaggctgaggcaggaggatcacttgagctcaggagtttgagaccagtctgggcaacatagcaagacctcgtctttgtttaggggaaaaaaaagaaatttaagtaggagattatataagcaaaaatacaattaatttccagcattcactatataatataaatctccagactttacttttttgtttactggatataaacaatatctttttctgtctccagataattcccccaccacctcccatatgtccagattctcttgatgatgctgatgctttgggaagtatgttaatttcatggtacatgagtggctatcatactggctattatatggtaagtaatcactcagcatcttttcctgacaatttttttgtagttatgtgactttgttttgtaaatttataaaatactacttgcttctctctttatattactaaaaaataaaaataaaaaaatacaactgtctgaggcttaaattactcttgcattgtccctaagtataattttagttaattttaaaaagctttcatgctattgttagattattttgattatacacttttgaattgaaattatactttttctaaataatgttttaatctctgatttgaaattgattgtagggaatggaaaagatgggataatttttcataaatgaaaaatgaaattcttttttttttttttttttttttgagacggagtcttgctctgttgcccaggctggagtgcaatggcgtgatcttggctcacagcaagctctgcctcctggattcacgccattctcctgcctcagcctcagaggtagctgggactacaggtgcctgccaccacgcctgtctaattttttgtatttttttgtaaagacagggtttcactgtgttagccaggatggtctcaatctcctgaccccgtgatccacccgcctcggccttccaagagaaatgaaatttttttaatgcacaaagatctggggtaatgtgtaccacattgaaccttggggagtatggcttcaaacttgtcactttatacgttagtctcctacggacatgttctattgtattttagtcagaacatttaaaattattttattttattttattttttttttttttttgagacggagtctcgctctgtcacccaggctggagtacagtggcgcagtctcggctcactgcaagctccgcctcccgggttcacgccattctcctgcctcagcctctccgagtagctgggactacaggcgcccgccaccacgcccggctaatttttttttatttttagtagagacggggtttcaccgtggtctcgatctcctgacctcgtgatccacccgcctcggcctcccaaagtgctgggattacaagcgtgagccaccgcgcccggcctaaaattatttttaaaagtaagctcttgtgccctgctaaaattatgatgtgatattgtaggcacttgtatttttagtaaattaatatagaagaaacaactgacttaaaggtgtatgtttttaaatgtatcatctgtgtgtgcccccattaatattcttatttaaaagttaaggccagacatggtggcttacaactgtaatcccaacagtttgtgaggccgaggcaggcagatcacttgaggtcaggagtttgagaccagcctggccaacatgatgaaaccttgtctctactaaaaataccaaaaaaaatttagccaggcatggtggcacatgcctgtaatccgagctacttgggaggctgtggcaggaaaattgctttaatctgggaggcagaggttgcagtgagttgagattgtgccactgcactccacccttggtgacagagtgagattccatctcaaaaaaagaaaaaggcctggcacggtggctcacacctataatcccagtactttgggaggtagaggcaggtggatcacttgaggttaggagttcaggaccagcctggccaacatggtgactactccatttctactaaatacacaaaacttagcccagtggcgggcagttgtaatcccagctacttgagaggttgaggcaggagaatcacttgaacctgggaggcagaggttgcagtgagccgagatcacaccgctgcactctagcctggccaacagagtgagaatttgcggagggaaaaaaaagtcacgcttcagttgttgtagtataaccttggtatattgtatgtatcatgaattcctcattttaatgaccaaaaagtaataaatcaacagcttgtaatttgttttgagatcagttatctgactgtaacactgtaggcttttgtgttttttaaattatgaaatatttgaaaaaaatacataatgtatatataaagtattggtataatttatgttctaaataactttcttgagaaataattcacatggtgtgcagtttacctttgaaagtatacaagttggctgggcacaatggctcacgcctgtaatcccagcactttgggaggccagggcaggtggatcacgaggtcaggagatcgagaccatcctggctaacatggtgaaaccccgtctctactaaaagtacaaaaacaaattagccgggcatgttggcgggcaccttttgtcccagctgctcgggaggctgaggcaggagagtggcgtgaacccaggaggtggagcttgcagtgagccgagattgtgccagtgcactccagcctgggcgacagagcgagactctgtctcaaaaaataaaataaaaaagaaagtatacaagtcagtggttttggttttcagttatgcaaccatcactacaatttaagaacattttcatcaccccaaaaagaaaccctgttaccttcattttccccagccctaggcagtcagtacactttctgtctctatgaatttgtctattttagatattatatataaacggaattatacgatatgtggtcttttgtgtctggcttctttcacttagcatgctattttcaagattcatccatgctgtagaatgcaccagtactgcattccttcttattgctgaatattctgttgtttggttatatcacattttatccattcatcagttcatggacatttaggttgtttttatttttgggctataatgaataatgttgctatgaacattcgtttgtgttctttttgtttttttggttttttgggttttttttgttttgtttttgtttttgagacagtcttgctctgtctcctaagctggagtgcagtggcatgatcttggcttactgcaagctctgcctcccgggttcacaccattctcctgcctcagcccgacaagtagctgggactacaggcgtgtgccaccatgcacggctaattttttgtatttttagtagagatggggtttcaccgtgttagccaggatggtctcgatctcctgacctcgtgatctgcctgcctaggcctcccaaagtgctgggattacaggcgtgagccactgcacctggccttaagtgtttttaatacgtcattgccttaagctaacaattcttaacctttgttctactgaagccacgtggttgagataggctctgagtctagcttttaacctctatctttttgtcttagaaatctaagcagaatgcaaatgactaagaataatgttgttgaaataacataaaataggttataactttgatactcattagtaacaaatctttcaatacatcttacggtctgttaggtgtagattagtaatgaagtgggaagccactgcaagctagtatacatgtagggaaagatagaaagcattgaagccagaagagagacagaggacatttgggctagatctgacaagaaaaacaaatgttttagtattaatttttgactttaaattttttttttatttagtgaatactggtgtttaatggtctcattttaataagtatgacacaggtagtttaaggtcatatattttatttgatgaaaataaggtataggccgggcacggtggctcacacctgtaatcccagcactttgggaggccgaggcaggcggatcacctgaggtcgggagttagagactagcctcaacatggagaaaccccgtctctactaaaaaaaatacaaaattaggcgggcgtggtggtgcatgcctgtaatcccagctactcaggaggctgaggcaggagaattgcttgaacctgggaggtggaggttgcggtgagccgagatcacctcattgcactccagcctgggcaacaagagcaaaactccatctcaaaaaaaaaaaaataaggtataagcgggctcaggaacatcattggacatactgaaagaagaaaaatcagctgggcgcagtggctcacgccggtaatcccaacactttgggaggccaaggcaggcgaatcacctgaagtcgggagttccagatcagcctgaccaacatggagaaaccctgtctctactaaaaatacaaaactagccgggcatggtggcgcatgcctgtaatcccagctacttgggaggctgaggcaggagaattgcttgaaccgagaaggcggaggttgcggtgagccaagattgcaccattgcactccagcctgggcaacaagagcgaaactccgtctcaaaaaaaaaaggaagaaaaatatttttttaaattaattagtttatttattttttaagatggagttttgccctgtcacccaggctggggtgcaatggtgcaatctcggctcactgcaacctccgcctcctgggttcaagtgattctcctgcctcagcttcccgagtagctgtgattacagccatatgccaccacgcccagccagttttgtgttttgttttgttttttgttttttttttttgagagggtgtcttgctctgtcccccaagctggagtgcagcggcgcgatcttggctcactgcaagctctgcctcccaggttcacaccattctcttgcctcagcctcccgagtagctgggactacaggtgcccgccaccacacccggctaatttttttgtgtttttagtagagatggggtttcactgtgttagccaggatggtctcgatctcctgaccttttgatccacccgcctcagcctccccaagtgctgggattataggcgtgagccactgtgcccggcctagtcttgtatttttagtagagtcgggatttctccatgttggtcaggctgttctccaaatccgacctcaggtgatccgcccgccttggcctccaaaagtgcaaggcaaggcattacaggcatgagccactgtgaccggcaatgtttttaaattttttacatttaaattttattttttagagaccaggtctcactctattgctcaggctggagtgcaagggcacattcacagctcactgcagccttgacctccagggctcaagcagtcctctcacctcagtttcccgagtagctgggactacagtgataatgccactgcacctggctaatttttatttttatttatttatttttttttgagacagagtcttgctctgtcacccaggctggagtgcagtggtgtaaatctcagctcactgcagcctccgcctcctgggttcaagtgattctcctgcctcaacctcccaagtagctgggattagaggtccccaccaccatgcctggctaattttttgtactttcagtagaaacggggttttgccatgttggccaggctgttctcgaactcctgagctcaggtgatccaactgtctcggcctcccaaagtgctgggattacaggcgtgagccactgtgcctagcctgagccaccacgccggcctaatttttaaattttttgtagagacagggtctcattatgttgcccagggtggtgtcaagctccaggtctcaagtgatccccctacctccgcctcccaaagttgtgggattgtaggcatgagccactgcaagaaaaccttaactgcagcctaataattgttttctttgggataacttttaaagtacattaaaagactatcaacttaatttctgatcatattttgttgaataaaataagtaaaatgtcttgtgaaacaaaatgctttttaacatccatataaagctatctatatatagctatctatatctatatagctattttttttaacttcctttattttccttacagggttttagacaaaatcaaaaagaaggaaggtgctcacattccttaaattaaggagtaagtctgccagcattatgaaagtgaatcttacttttgtaaaactttatggtttgtggaaaacaaatgtttttgaacatttaaaaagttcagatgttagaaagttgaaaggttaatgtaaaacaatcaatattaaagaattttgatgccaaaactattagataaaaggttaatctacatccctactagaattctcatacttaactggttggttgtgtggaagaaacatactttcacaataaagagctttaggatatgatgccattttatatcactagtaggcagaccagcagacttttttttattgtgatatgggataacctaggcatactgcactgtacactctgacatatgaagtgctctagtcaagtttaactggtgtccacagaggacatggtttaactggaattcgtcaagcctctggttctaatttctcatttgcaggaaatgctggcatagagcagcactaaatgacaccactaaagaaacgatcagacagatctggaatgtgaagcgttatagaagataactggcctcatttcttcaaaatatcaagtgttgggaaagaaaaaaggaagtggaatgggtaactcttcttgattaaaagttatgtaataaccaaatgcaatgtgaaatattttactggactctattttgaaaaaccatctgtaaaagactgaggtgggggtgggaggccagcacggtggtgaggcagttgagaaaatttgaatgtggattagattttgaatgatattggataattattggtaattttatgagctgtgagaagggtgttgtagtttataaaagactgtcttaatttgcatacttaagcatttaggaatgaagtgttagagtgtcttaaaatgtttcaaatggtttaacaaaatgtatgtgaggcgtatgtggcaaaatgttacagaatctaactggtggacatggctgttcattgtactgtttttttctatcttctatatgtttaaaagtatataataaaaatatttaatttttttttaaatta

SEQ ID NO: 13 - DNA, 1634 bp, Homo sapiens
ccacaaatgtgggagggcgataaccactcgtagaaagcgtgagaagttactacaagcggtcctcccggccaccgtactgttccgctcccagaagccccgggcggcggaagtcgtcactcttaagaagggacggggccccacgctgcgcacccgcgggtttgctatggcgatgagcagcggcggcagtggtggcggcgtcccggagcaggaggattccgtgctgttccggcgcggcacaggccagagcgatgattctgacatttgggatgatacagcactgataaaagcatatgataaagctgtggcttcatttaagcatgctctaaagaatggtgacatttgtgaaacttcgggtaaaccaaaaaccacacctaaaagaaaacctgctaagaagaataaaagccaaaagaagaatactgcagcttccttacaacagtggaaagttggggacaaatgttctgccatttggtcagaagacggttgcatttacccagctaccattgcttcaattgattttaagagagaaacctgtgttgtggtttacactggatatggaaatagagaggagcaaaatctgtccgatctactttccccaatctgtgaagtagctaataatatagaacaaaatgctcaagagaatgaaaatgaaagccaagtttcaacagatgaaagtgagaactccaggtctcctggaaataaatcagataacatcaagcccaaatctgctccatggaactcttttctccctccaccaccccccatgccagggccaagactgggaccaggaaagccaggtctaaaattcaatggcccaccaccgccaccgccaccaccaccaccccacttactatcatgctggctgcctccatttccttctggaccaccaataattcccccaccacctcccatatgtccagattctcttgatgatgctgatgctttgggaagtatgttaatttcatggtacatgagtggctatcatactggctattatatgggttttagacaaaatcaaaaagaaggaaggtgctcacattccttaaattaaggagaaatgctggcatagagcagcactaaatgacaccactaaagaaacgatcagacagatctggaatgtgaagcgttatagaagataactggcctcatttcttcaaaatatcaagtgttgggaaagaaaaaaggaagtggaatgggtaactcttcttgattaaaagttatgtaataaccaaatgcaatgtgaaatattttactggactctattttgaaaaaccatctgtaaaagactgaggtgggggtgggaggccagcacggtggtgaggcagttgagaaaatttgaatgtggattagattttgaatgatattggataattattggtaattttatgagctgtgagaagggtgttgtagtttataaaagactgtcttaatttgcatacttaagcatttaggaatgaagtgttagagtgtcttaaaatgtttcaaatggtttaacaaaatgtatgtgaggcgtatgtggcaaaatgttacagaatctaactggtggacatggctgttcattgtactgtttttttctatcttctatatgtttaaaagtatataataaaaatatttaatttttttttaaattaaaaaaa

SEQ ID NO: 14 - protein, 294 aa, Homo sapiens
MAMSSGGSGGGVPEQEDSVLFRRGTGQSDDSDIWDDTALIKAYDKAVASFKHALKNGDICETSGKPKTTPKRKPAKKNKSQKKNTAASLQQWKVGDKCSAIWSEDGCIYPATIASIDFKRETCVVVYTGYGNREEQNLSDLLSPICEVANNIEQNAQENENESQVSTDESENSRSPGNKSDNIKPKSAPWNSFLPPPPPMPGPRLGPGKPGLKFNGPPPPPPPPPPHLLSCWLPPFPSGPPIIPPPPPICPDSLDDADALGSMLISWYMSGYHTGYYMGFRQNQKEGRCSHSLN

SEQ ID NO: 15 - RNA, 15 nt, Artificial Sequence
  Synthetic
ccagcauuaugaaag

SEQ ID NO: 16 - DNA, 18 bp, Artificial Sequence
  Synthetic
  misc_feature (1)..(18): modified with 2'-MOE
  misc_feature (1)..(17): modified with phosphorothioate bond
  modified_base (2)..(2): m5c
  modified_base (4)..(4): m5c
  modified_base (8)..(8): m5c
  modified_base (15)..(15): m5c
tcactttcataatgctgg

SEQ ID NO: 17 - RNA, 26 nt, Artificial Sequence
  Synthetic
cuauauauagauaguuauucaacaaa

SEQ ID NO: 18 - RNA, 19 nt, Artificial Sequence
  Synthetic
aaggugucgaugcacuaca

SEQ ID NO: 19 - RNA, 19 nt, Artificial Sequence
  Synthetic
gcauuguaacgccuaucga

SEQ ID NO: 20 - RNA, 18 nt, Artificial Sequence
  Synthetic
gcagaugaacucgggaug

SEQ ID NO: 21 - RNA, 19 nt, Artificial Sequence
  Synthetic
cgucuacuugagccacuac

SEQ ID NO: 22 - DNA, 21 bp, Artificial Sequence
  Synthetic
ccgcacucguucucgaucutt

SEQ ID NO: 23 - RNA, 21 nt, Artificial Sequence
  Synthetic
agggcgugagcaagagcuaga

SEQ ID NO: 24 - DNA, 20 bp, Artificial Sequence
  Synthetic
gcuagauggaagaacacuat

SEQ ID NO: 25 - DNA, 21 bp, Artificial Sequence
  Synthetic
ctcgaucuaccuucuugugau

SEQ ID NO: 26 - DNA, 21 bp, Artificial Sequence
  Synthetic
ggacugccuccaaguggaatt

SEQ ID NO: 27 - RNA, 21 nt, Artificial Sequence
  Synthetic
gaccugacggagguucaccuu

SEQ ID NO: 28 - DNA, 21 bp, Artificial Sequence
  Synthetic
ccucgaaaugauagacgaatt

SEQ ID NO: 29 - DNA, 21 bp, Artificial Sequence
  Synthetic
ttggagcuuuacuaucugcuu

SEQ ID NO: 30 - DNA, 21 bp, Artificial Sequence
  Synthetic
gcauaggguugacugauaatt

SEQ ID NO: 31 - DNA, 21 bp, Artificial Sequence
  Synthetic
ctcguaucccaacugacuauu

SEQ ID NO: 32 - DNA, 21 bp, Artificial Sequence
  Synthetic
cgacgucccuuugauccaatt

SEQ ID NO: 33 - RNA, 21 nt, Artificial Sequence
  Synthetic
gggcugcagggaaacuagguu

SEQ ID NO: 34 - DNA, 21 bp, Artificial Sequence
  Synthetic
ggauaccucuaguaaagaatt

SEQ ID NO: 35 - RNA, 21 nt, Artificial Sequence
  Synthetic
agccuauggagaucauuucuu

SEQ ID NO: 36 - DNA, 21 bp, Artificial Sequence
  Synthetic
ggauuauuuaauaacauuatt

SEQ ID NO: 37 - RNA, 21 nt, Artificial Sequence
  Synthetic
aaccuaauaaauuauuguaau

SEQ ID NO: 38 - DNA, 21 bp, Artificial Sequence
  Synthetic
cgucagcguguaucaggaatt

SEQ ID NO: 39 - RNA, 19 nt, Artificial Sequence
  Synthetic
gcagucgcacauaguccuu

SEQ ID NO: 40 - DNA, 21 bp, Artificial Sequence
  Synthetic
ggccgugguaguuacucaatt

SEQ ID NO: 41 - RNA, 21 nt, Artificial Sequence
  Synthetic
gaccggcaccaucaaugaguu

SEQ ID NO: 42 - DNA, 17 bp, Artificial Sequence
  Synthetic
cagagtggttgtctctg

SEQ ID NO: 43 - DNA, 18 bp, Artificial Sequence
  Synthetic
ctccacgacaccagtgcc

SEQ ID NO: 44 - DNA, 17 bp, Artificial Sequence
  Synthetic
ggacgccggagccgcag

SEQ ID NO: 45 - DNA, 18 bp, Artificial Sequence
  Synthetic
gagatcgagaacgagtgc

SEQ ID NO: 46 - DNA, 17 bp, Artificial Sequence
  Synthetic
atgcatcgtgattcctg

SEQ ID NO: 47 - DNA, 17 bp, Artificial Sequence
  Synthetic
ctgcgacgaggtggagg

SEQ ID NO: 48 - DNA, 17 bp, Artificial Sequence
  Synthetic
gttacggttctggacgc

SEQ ID NO: 49 - DNA, 16 bp, Artificial Sequence
  Synthetic
gctccgggagcgggag

SEQ ID NO: 50 - DNA, 19 bp, Artificial Sequence
  Synthetic
gatccaagggatgcagatg

SEQ ID NO: 51 - DNA, 20 bp, Artificial Sequence
  Synthetic
ctatcatttcgaggtctgcg

SEQ ID NO: 52 - DNA, 17 bp, Artificial Sequence
  Synthetic
gtggatacagcagtcgg

SEQ ID NO: 53 - DNA, 18 bp, Artificial Sequence
  Synthetic
ctggatctgcttccagag

SEQ ID NO: 54 - DNA, 19 bp, Artificial Sequence
  Synthetic
ggtctagatcacattctcg

SEQ ID NO: 55 - DNA, 18 bp, Artificial Sequence
  Synthetic
ccagacctagatcttctg

SEQ ID NO: 56 - DNA, 18 bp, Artificial Sequence
  Synthetic
caggagcgagaacccgag

SEQ ID NO: 57 - DNA, 19 bp, Artificial Sequence
  Synthetic
cttctgcatatggtacgac

SEQ ID NO: 58 - DNA, 18 bp, Artificial Sequence
  Synthetic
cccacaggggcatguagu

SEQ ID NO: 59 - DNA, 16 bp, Artificial Sequence
  Synthetic
  modified_base (1)..(16): modified with 2'-O-methylation
  misc_feature (8)..(14): modified with phosphorothioate bond
cccacaggggcatgua

SEQ ID NO: 60 - DNA, 19 bp, Artificial Sequence
  Synthetic
gttacccagcacgtgtacc

SEQ ID NO: 61 - DNA, 18 bp, Artificial Sequence
  Synthetic
ggcctgaaggtcatctcc

SEQ ID NO: 62 - DNA, 21 bp, Artificial Sequence
  Synthetic
gagtacattgaagagaacaag

SEQ ID NO: 63 - DNA, 21 bp, Artificial Sequence
  Synthetic
cactgtgtcatcgaagtgttc

SEQ ID NO: 64 - RNA, 15280 nt, Homo sapiens
ccacaaaugugggagggcgauaaccacucguagaaagcgugagaaguuacuacaagcgguccucccggccaccguacuguuccgcucccagaagccccgggcggcggaagucgucacucuuaagaagggacggggccccacgcugcgcacccgcggguuugcuauggcgaugagcagcggcggcagugguggcggcgucccggagcaggaggauuccgugcuguuccggcgcggcacaggccaggugaggucgcagccagugcagucucccuauuagcgcucucagcacccuucuuccggcccaacucuccuuccgcagccucgggacagcaucaagucgauccgcucacuggaguugugguccgcguuuuucuacgucuuuucccacuccguucccugcgaaccacauccgcaagcuccuuccucgagcaguuugggcuccuugauagcguugaguggaggcccugccgcgacuuggcaguagcuuauuuuguucacuccucucuggcuggugugggggaggugggggcauuaggccagggugaagcaggggaaccacuuaggagucuguuaagaugaucugaacuucagaacaagauguuauuaacagagugaaaguauuuggauucuggguauauuuugaaaucggaggcaacagguuuuucagauagauucgauaacggagguuauccugaauaguugaaaagauaaaguugccuuuugcugaggugggaaagagaagauugccaguagagcagguuucucaggaguucagucuugggcauagcaugguaggggugaauuuggcuggagugaguuggagaguaggagaagagaaauccaaggcaacauuugaccagccugggcaacauagugugacuccgagucugcaaaaauuagacggguguuguggugcgcgucuguggucucagcuaccuggaagguucaggccuuggaaggcucagggagguggaggcugcagugaucugugauugcgccucugcacuccagccugggcgacagagccagacccugucuuaaaacaaaauaaacggccgggcgcgguggcucaagccuguaaucccagcacuuugggaggccgaggcggccggaucacaaggucaggagaucgagaccauccuggcuaacacggugaaaccccgucucuacuacaaauacaaaaaauuagccgggcguggugacgggcgccuguagucccagcuacucgggaggcugaggcaggagaaugucaugaagccgggaggcggagcuugcagugagccgagaucgcgccacugcacuccagccugggcgauagagcaagacuccgucucaaauaaauaaauaaauaaauaaauaaauaauaaaaacaucgguaggcauauuucaaggaauucuauuuaaaaaaaauuuuuuuagagacaaguucgcucucuguggcccaggcuggaguacaguggcaugauccuagcccauggcagcguugaucucuuggccucaagcgacccuccuuuggagucgcugggccuaaaggagugagccaccacgaaauuuuauuauaaauggaggguagagaaauugggcaauaaauggagggggaagugaguuaagaggaauuuuaauuaugugugugugguuuuaaaagaggggggucuugcucuguugcccaggcugcuggggugccaguggcgcaaucaugaaucacuacagccuuggacuccuggccucaagcuauccucccaccucugccucccaaaguacugggauuacuagugugagccacugcacuaagauaggagcaacauguuucagcauguuuguggguugauaggaaagaugagaaugggaaaguugaugucggaaagaagacaauggcuagagcaauguccuagaguagguaagaagggauggauuuggccuuuguuggaaacauuagcgguucuuuuggugacagcuauauaguuaacacaucuaugauacgugaaugggcagauaggauggcaggagauuuugaaaguucucuugauucuuacuguucucuuagugaaagaagcaagguuaucagcuagaagcugggaugggagaggaaagagaagaugggaaguagauaguucuuuagaagagugggcaaggguuggacuagggaaguuuaguggaaauauugcuaggcaacauaaagagccuacuugagauucguggucaugaguugaaggagaccagacagcaagauuguguaugagggcacccacagaguaaauggagaguugaaauuaaugcaguugugauuuuaccacguggauaugaagaagugagggggagaaguacaaaggaguucucuuaaugauugaccauggaauuuaagcuggcuaagaaaggaagugagaggccgggcgcgguggcucacgccuguaaucccagcacuuugggagacugagguggguggauuaccugaggucaggaguuugagaccaaccuggccgauauggcgaaaccccaucucuaauaaaaauacagaaaaauuagccgggaaugguggcaggugccuguaaucccagcuacucaagaggcuguggcaggaguaucccuuggacccaggagguggagguugcagugagccgagaucacgccacuguacuccagccuggacgauauagugagacuucaccucaaaaaaaaaaaaaaagaaaggaagugaggauuuuaagacccugagagacaguuuaaaaagugggaggaucggccgggcgcuguggcugacaccuguaaucccagcacuuugggaggccgaguugggcagaucacaaggucaggaguucgagaccagccuggccaauauggugaaaccuugucucuacuaaaaauacaaaaauuagccgggcauggugucacgugucuauaaucccagcuacucgggaggcugaggcagaaaaauugcuugaaccugggaggcagagguugcagacagcugagaucacuccauugcacuccagccugggcaacaagagcaaaacuuugucuuuaaaaaaaaaaaaaaaaaaagaauacaaaaauuagccgggcgugguggcgcgugccuauaaucccagcuacuugggaggcugaggcaggagaaucaguugaacacgggaggcgagguuugcagugagccgagauugcgccacugcacuccagccugggcgacagagcaggacuccucuuggaaaaaaaaaauuagcugggcaugguggcaggugccuguagucucagcuacuagggaggcugaggcaggaaaaucacuugaacccgggauguggaguuugcagugacccgagaucgugccacuguacuccauccugggcgacaaaaugagacucugccucaaaaaaaaaaaaaaaaaaaagugggaggaucaauguacugccaguccuaaugaaguggaaugauuguccccaucaaaucacuaguaggaguaaguugcagagccuagaaggugaugguuaagagagugggauucuugaaacugcauuuauggagagguugugguuauugguuauaauaaauaaauacaguugaagugagugaguagcugagauuuggggauguaucaguucauucuuacacugcuacaaagacauaccugagaccagguauuuauaaagauaagagguuuaaucagcucacaguucugcugccuguacaggcuucucuuguggaggccuaaggaaacuuacagucaugguggaaggugaaggggaaacaagcacagucuucacauggccagcaggagagagagagaagggggaagugcuacauacuuuaaaacaaccagaucuugugagaacgcuuaucaggaaacagcacuuggggauggugcuaaaucauuagaaaucacccccaugauccagucgccuccuaccaugcccaccuccaacacuggggaucacaauucagcaugagauuuggguaggaacacagagcugcaccacaucagaggauguacaagauugugguggagaggaguuuagagaccugcaaauauaggguaauugaagggaucaucuacauggauauuuaaaucaccaaaaauuaugacaggaguaguguuggagagagaacugcgauguaaacauuaaggaaugaggaagagugacucgguaggcuguaggugacugcaauaggaaacgauaauagacugugagucuggugacaagauuuuccuucuuucuuuuuuuccccccccccgagacagggccucuuuuuguugcccaggugggagugcaguggcgcgaucacggcucacuacaaccuccucccaagcucaagggauucucccacuucagccucucaaguagcuggaacuacaggugcugaccaccaugccuggcuacuuuuugucaggauuuucaaggcugggaauuuugagaggggaauggaggagaauaaucugaaagugcaaguaaggagcagggaagauuucuuuuuucuuuuuuuuuuuuuuuuuugagucggagucuggcucagucgcccaggcuggagugcaguggcgagaucuccgcucacugcaagcuccgccucccguguucacgccauucuccuccuucagccucccgaguagcugggacuacaggcgcccgccaccacgcccagcuaauuguuuuuuuguauuuuuaguagagacgggguuucaccguguuagccaggauggucucaaucuccugacuuugugauccgcccaccccggccucccaaagcgcuugggauuacaggcgugagccaccgcgccagccagagcagggaagauuucuuccccacaucuccaguagguacagugauaugaaguguguggaggagaaaagaggaaacaucuaucauuugagauggcugcgaaaggaaaaggcauccucagggagcuagauuuuacuuagagcaagaaaugaagggaugauucagagguuaaaagaguggauuuuaugaauuacucaagggagcacaguggaaguuucaggaagugguaggagaagguagaagauggcaggguguugggaauaauuugagaaaucugagcuacuggaaaugacugagaaucagauauaaaggcaguccuggugguccguucuggcugccguugcuguguaacgaaucugccaaaacuuaguggcuugaaacaacaaagaacauuuuauuaucucucauuguuucuguggguuaggaauuugugagagccgugcugggcaguuuucgugcggcugucucgugguugcaccuacauaguugcuagagcuacaguagcuggggacugagcagcuagggauuggcaggcuaucucuuuuuuucauguagucucaugaagauuucuuuaugugguuucaaugugugggcugguuuggauuuccuuauagcaugguggccucaguuggauugcuguuuugugauccuuuucaucccuccuuguccuguccccagacaaccacugaucuacuuucugucaccauagauuagccugcauuuuuaagaauuuuuauaaacguggaaugauagaguaccuuuuuugucacguuucuuuuauuuaucauagcuauuuugauuuucauccauuuuauugcugaguaguaucccauugcauguauauacuauacuguauucauucgcuugcuugugaacauuugggcuuuuuccaguuugggacuguuaacaaguagagccacuaugaauauuaguguauaagacuucauauagccaaggcuggcagaucgcuugagcccaggaguuugagaccagccugggaaacauggugaaaccucuauuuuuauuuuaaaaucaaaaauuaaaaauuuucuauaaaaaauuuuaaagaagacuuuguauagacauacgcuuucauuuuucuugagugaauacuuaggucucaggguagauguauuuuaagucuuuaaggagcugucaaacucuuccucaaaguggugguuguaccauguuacuuuuuaauauaacagagauuaauugagcaaagaaaaauucaaaaguuggacagcccccacaacuaaauagguucagaacagcucccccauuuugcauuuugaccagcaauguaugaaaguuccauuugcucagugucccugcaaacaccugguauggucagucuuuuuaauuuuaggcauuauaauagauauaguggcuucuugugauuuuaauuagcauuuccuaaugaccagugcugcuguugaucauuucaugaguguauuugccauccguauaucuuuuuuggugaagugucuauucaaaucauuuggguuuuuuuuuuuuuuguuuuuuuuuuuuggagacagugucucacucugucacccaggcuguugugcaguggugcaaucacacagccuacugcagccuccaccuccugcgcucagucuucuugucucagccuucugaguagcugaaauuacgagcacacgccacaaugccuggcuaauuuuuuaaaauuuuguagaaacaaggucucauuauguugccugggcuugucgugaacuccugggcucaagcaaucuuccugccucagccucccaaagauugggauugcaaguaugagccacugcacccggccaacuuacccaucuuuuaauugaauuuuuuuguuguugagguuugagaguucuucauguuugcuggguacaauaucuuuaucagauagguaacuugcauguauuuucucccgguuuacacuuugguuuuucauuuuguuaacaacgucuuuuuaagaacagaaaaucuuaauuuugcugaaaucuaauuuuucaguuuuuucuuugaugguuuugagagaggagguaaaaaaagacuagguaagccgauaguuagacagaguccucgguagaacuucccuucuaacaaaaagcagcccaagaaaucacuucucuucuaacaaggagcagccuggaagaucgggcuguaaacauguauaaggaagcagcucuggcacagagggggagcuuccuggguaaucagcaagcuucacauacguaagguggguaugugaaguaaacacaguaugugaaguaaacacaguggaccuuaguacauacucagauaaggaagcuggaagcuugcauguugugaguuguugggguugccugcagcugcacggagagaaagggguaccuggggccaggcauguccaccaugguggcuccaccuccccuuauuuagcacaugcacaauaggaaagagauaagcaauguggaguagcucaggccaaggaccugccugcauaauaaaagguuggggugggggaugccagagauucacgcucugugcagauggcaacaccugguccuaacugguuuuuugcucccuauguguagauaagcuacccccuucccauuagcucauuuauaaaaaugcuugcauuucacuguggaaugggaacucuuuucaggaccucucucugcaggagagagcuagucucuuucuuuugccuauuaaacuucugcucuagccucacacccuuggugugucagcguccuugauuuccucagcgugagaccaagaaccucgggugccaccccaggcaacaaggccauuucaguuuguucuuuuguuauaggcaauccaugaucacagauuuuucucucuuuuuuuuuuuuacacaguuuagaguuuuaguuuuacacuuaggucuguaauccauuuuguauuaauucuuauauguggcucaguguagguggaaauuugguuuguuuuugcauaaggauuuccaauaguuuuaccaccauuucuugaaacuacuaugcuuucucuauuaaaccacauuuguaacuuuaguuaaaaucagucacauauaucacagggcuauuucugacucucaauucuguuacauugucuauuaguguauauugaugucaguacuacacuuuuaauuacuauugcuucaggguaugucuuguaaaccaaaaauaaaauuauaggccccccccgccccugcacaaccaacugaauggacccauccucucagccaagggcauuccaaaauuaaccugaaaaacuaguucaagccaugaugggaagggggaguuggacaugucucaucacacccuacuaccuuuuggaauuacugauagaacagacucuuaaagucugaaaagaaacauuuacaaccuacccucucugaagccugcuaccugggagcuucaucugcaugauaaaaccuuggucuccacaaccccuuaugguaacccaaacauuccuuucuguugauaauaacucuuucaacuaguugccaauuagaaaaucuuuaaaucuuccuaugaccuagaaaccucccuacccccacuuugaguuguccugccuuuccugacagaacucauguacaucuuacauauauugauugaugccucaugucucccuaaaauguauaaaacaaagcuguaccccaccaccuuggggacaugucaucaggaccuccuguggcugugucauaggagcgucuuuaacuuuggcaaaauaaacuuucuaaauugauugaaaccugucuuagcuacuucugguuuacagucuuaaaguuagauaauguaaauuguccagcuuugguuuauuuuuguccuuaguaguuccauauaaauuuuagaaucagcuuuucaauuuaauacacuacuuuccucuuagauccacaauuaaauauauuugaugcuaacaauucuguuuuauguuuuucguuuuuuuuuuuugagacaagaguuucgcucuuguugcccaggcuggagugcaguggcgcgaucuuggcucaccacaaccuccaccucccagguucaagcaauucuucugccucagccucccgaguagcugggauuacaggcaugcgccaccacgcccggcuaauuuuguauuuuuaguagagacgggguuucaccauguugaucaggcuggucuugaacuccugaccucaggugauccacccaccucggccucccaaaguguugggauuacaggcgugaaccaccaugccuggccaguucuguuauuuuuaaaacccaaguuucccuggucauaucuugguuggaugaagcguauuuucaauagauuacccuggaaaggcuagugaguacgguauucuucuacauuuuagacuuuucuuagucuugcuacuucaaggacagcuaggcugcauauaaaauucuuggcucauacuuuuuccccauaaauuucuaugagaaagucuaaugauaacugauuuucuuuauuuuguaacuuagucuuuuugcuuagaggcucucugaggaugggaggggguucuuccucccaucccuaggaauuuuucuuuuuuuuaaauuccuaaucacuagaccaccaggaagauuguuuguuuuguuuuguuuuuauucuucagggaccccauuuauacauacguuaaauaaauacuguuugccaauguaucaaccauuuugcuucuuauuuauuuuuguuccuuugguucuuuuucauggcuuugcuuuggugcuccuuagauuuucagucagauguauuuguccuuggguaccuuguaaucaguauuaccuuuucuucugucgcuuuguuuucuguucguuuugaaauuacuuguuuccuggucuggcaauaacaguugagauaugaggaguuugagcugccaucugucuauguaucuugcuuuaagacugcacucuucuauugauaucacuggccuugauuuugugauuucuuuauuucuucaggaccacccuucauuuucuacuguuugcuuccuuuuuuuuugagauggagucucacucugucacucaggcuggagugcagugaucuuggcucauugcaaccucugccucccggguuccagcaauucuccugccucagccucccaaguaucugggacuacaggugugcaccaccaugcccggcuaaguuuuguauuuuuaauagagacgggguuuugccacauuggcaggcuggucucaaacuccugaugucaagugauccacccaccccacccaccucugcaucccaaagugcugggauuacaggaaugagcugccgugcccagccuccccccuaccccccuuuuuuucuuucgagacagagauuauaggugugagccacuggacccagccuguuuuuauuccuuuuaccaaaucuccaaggaauaucuucccuuccaagugcgaauguaaccuuaagucaguuaaccucuuugugauuacuuuucuuaucugcaaagugacuuaaugaucuuaaguacuuuuuuuuuuugagacagggucucacugucacccuggcuggagugcaguggcacgaucucugaucuccacucacugcaaucuccucuucccugguucaagcggcccucccaccuuagccuucuggguagcugggacuacagaugugaaccaccacgcccagcuaauuuuuguacuuuuuguagagaugggguuuugccauguugcccaggcugggauuauuaaguacuuuuuaucauacagcaagauugacauuuuauauuggaauacauuugucucuauauaacggagauuaacaggaaaaugacaagccugggugcgguggcucaugccuguaaucccagcacuuugggaggcugaggugggaggaucacuugaggucaggaguucgagaccaguuuugccaagaugaugaaagcccaugucuacuaaaaauacaaaaauuagcccagcuugauggugggcgccuauaaucccagcuauuugagagacugaggcaggagaaucacuugaaccugggcagcagagguugcagugagccgagaucaugccacugcacuccagccuggguggcauagcgagacucuugucucaagagaaaacaaaacaaaacaaaaaaaaaacaggaaaaugacaaaaaguaauauuacaacucagugaauuuuauaacaaacuuuuuuggaauucauugacuaauacuauaccaaauccaaaauacucucuaguauaccaaauccaacucuacccuauaguauaaauuggauucuauuuggacuugucucacuaaucccucauacaguguguuuuauuuuuuauugaaguaaaaaaauuugucauuuuaaccauuuuuaaguauauaguucaguaauauuaaguauguucauguuguugcgcaauagaucuucggaaguuuuucgucuugcaaccugaaacucuacccauuagcaaauucccauuucuccuuacacuuagcccuugguaaucaucauucuuuuuuuuuuuuuuuugagauggaguuuuacucuuguugcccaggcuggagugcaauggugcaaucucgacucaccacaaccuccgccucccagguucaagcaauucuaccucagccucccgaguagcugggauuacagucaugcaccaccacgcccggcuaauuuuguauuuuuaguagagaagggguuucuccauguugaggcuggucucgaacuccugaccucaggugaucugcccaccucggccucccaaagugcugggauuacaggcgugagccacugcgccuggcccauucuuucuaauucuauaaauuugacuacuuaguuaccuuacauaaauaaauucuuauaguuaguguuauuuuugcuuccaugccuuuuuuguuguuguucaugcucuuacuuggaaugcguucuauuuugucuaccuaugcacauccuguuggguuuuuuuuuuuuuuggggguuuuuuuuguuuuuuuuuguuuuuuuuucccagacaaggucucaauuuguuacccaggcuggagugcagcggcgccaucuccacucacugcauccucaacuuccugggcccaggugauccucucgccucagccccugcagguagcugggacuauaggcaugugccaccaugcccagcuaaauuugguuuuuuuguuuguuuguuuuugagacagagucucacucugucacccaggcuggagugcaguggcacaaucucagcucacugcaaucucugccgcccggguucaagugauucuccugccucagccucccaagcagcugggauuacaggugacugccaccacgccagcuaaguuuuguaguuuuaguagagaugggguuucaccuuguuggccaugcuggucucgaacuccugaccucgugaucugccugcuucugccucccaaagugcuggaauuacaggcaugagccaccacgcccggccagaauuuuuguauuuuuaguagacacaagguucuuacccuguugccuaggcuggucuggaaguccuggacucaagcaauucaccugccuuggccucccaaaaugcugggauuacaagccaccaugcccggccuaaauccuguuguuuuguuuuguuuuauuuuguuuuguuuuguuuuguuuguuuuuugagacagagucucgcuaugucucucaggcuguagugcaguggcgcgaucuuggcucacugccaccucugccucccagguucaagugauucuccugccucagccucccaaguagcugggauuacaggcaugugcuacuauguccggcuaauuuuuguauuuuuaguagagacaggguuucaccauguuggccaggcuggucucgaacuccugaccucgugauccacccaccucggccacccaaagugcugggauuacaggcgugagugguuuuuauuucuuaggccgguuuccuccauaugaucuugcaguagacauuaauuucuuuccuuuuuaauuaaaauacuguuuguauuucacauuuugauguuuguuaagauuuguuuuauauuguuuuuuguuuugucuugugugauagucuuaaaucccuaguuagauaauaacuggagaguaccauguuucuauauaucucucagugacuugcacagugcuagcagauagugcuaaaaaauuauuuauuauuauuauuauuuuguuauuguuguuguuguuguuagacagggucuuccucugucacccaggcuagagggcaaugggaugaucauagcuuacugcagccuccaacaacugggcucauguaauucuccugccucagcuucccaaguagcugggauuacaggcaugagccaccaugucuggacaaaaauauuuccaggugcaguggcucaugccuguaauucccacacuugggaggccgagcgaggcuggaggaucacuugagccuaggaguucaagaccagcuuggcuaagauggcgagaccccgucccuacaaaaaauuuuaaaaacuagccaggcaugguggcaugcaccuauauucccaacuacucagugggcugaggugggagggucauuugaacacaggaauuugaggggagaaaaaaagaagagagaaagagaagugaaggaaggaagaaaggaaggagggagggagagaagaaagaaacgaaagaaaggaaaagaaaaggaaggaaagaaaauugguaccaggaaagcaggaaagggaaauggaaguaaaaaaauaauaauaauaauaaaaugaaaauugguuagucacuauuaacaauuuguauccuuauaaucuggaaacauuauaauuucaaaagaaaaaauauucuuuggaucauagguucugaggucagaacagcauucccguagucuagaugaagucaaguuuuaucugaucuuaauugaaauaaauauagcuggccuugaacaaaucuacucaugguauguggauaggaauuaaauuguaggggcauucacuugauggcauucauucuuagaacauuuaccuaugucuagcuuuuggaguaaagucacauaaccucuaaccagguaaguuuccuguggcuuuauuuaggauuuuaaauacucauuuucaguguaauuuuguuauguguggauuaagaugacucuugguacuaacauacauuuucugauuaaaccuaucugaacaugaguuguuuuuauuucuuacccuuuccagagcgaugauucugacauuugggaugauacagcacugauaaaagcauaugauaaagcuguggcuucauuuaagguaugaaaugcuugcuuagucguuuucuuauuuucucguuauucauuuggaaaggaauugauaacauacgauaaaguguuaaaguacauguuauucaguuuucauuuugaagauuagaugguaguaugaguuaguuaaaucaggugauauccuccuuuagaaguugauagccuauauaugucauccuuuguggaggcaauuuaaauaaaauuuaaaacauuuauuccuggcuggguaugguggcucacuccuguaaucccagcacuuugagaggcugaggcggguggaucaccugaggucaggaguuugagaccagccuggccaacauggugaaaccccgucuuuacuaaaaauacaaaaauuagccaagcaugguggcacgugccuguaaucccagcugcuugggacacugaggcaggagaauugcuugaaccuggggggcagagguugcaaugauugcaccacugcacuccagccugggcgauagagugagacuccaucucagaaaacgaacaaacaauguauuccuuuuaguauuuuuacauuguaucaaacuauggaaguccucuaauugagauuaauaagaaaaagacaaucugaauuauaauuuuaaacauuuaacaagcauguaguaaaauaaugaugaagauaaauagcauuaguacagcaauuaauauuuguagcaugcugacagugcucugugugcguuucauauauuaaauuacucuaaucaucccaaauccuguaaguuggguaucaauucaaguguuccuauuggguaggaauauacaguucuuuuaggaaauguaguaugguucugugucucaaacaggacacuuacacaguuggccaacaucaucaccuucuccauucucugagauguuuagucuuacugagcacuaaauaugggucaucaauaguccagacuaccuugagcaaacaauaguccagacuaccuugagcaaacagagcauauacucauacaguguauaaagagcaccaagcauacagauuucaugucuuucucauaguuacucuuguaacaugagcuaaagaucagaccucuaugucaccuuuguaacugauuucuagauuuuuuuuuuuuuuugagauggggucuugcccugucacccaggcuggaguguaguggcgugaucaugccucauuggagccuucaacucaugagcucaaacaauccuccuaccucagcuuccugaguaguugggaccacaggugugugccaccacacccagcucauuuuuguauucuuuguagagaugcagucucacccuguugcccacgcuggccuggaacuc

SEQ ID NO: 65 - DNA, 18 bp, Artificial Sequence
  Synthetic
  misc_feature (1)..(2): modified with phosphorothioate bond
  modified_base (1)..(1): modified with 2'-O-(2-methoxyethyl)
  modified_base (2)..(2): modified with 5'-methyl C with 2'-O-(2-methoxyethyl)
  modified_base (3)..(3): modified with 2'-O-(2-methoxyethyl)
  modified_base (4)..(4): modified with 5'-methyl C with 2'-O-(2-methoxyethyl)
  modified_base (5)..(7): modified with 2'-O-(2-methoxyethyl)
  modified_base (8)..(8): modified with 5'-methyl C with 2'-O-(2-methoxyethyl)
  modified_base (9)..(14): modified with 2'-O-(2-methoxyethyl)
  modified_base (15)..(15): modified with 5'-methyl C with 2'-O-(2-methoxyethyl)
  modified_base (16)..(18): modified with 2'-O-(2-methoxyethyl)
  misc_feature (17)..(18): modified with phosphorothioate bond
  misc_feature (18)..(18): modified with two internal hexaethylene glycol spacers
  misc_feature (18)..(18): modified with 3'-cholesteryl with tetraethylene glycol
tcactttcataatgctgg

SEQ ID NO: 66 - DNA, 18 bp, Artificial Sequence
  Synthetic
  misc_feature (1)..(2): modified with phosphorothioate bond
  modified_base (1)..(1): modified with 2'-O-(2-methoxyethyl)
  modified_base (2)..(2): modified with 5'-methyl C with 2'-O-(2-methoxyethyl)
  modified_base (3)..(3): modified with 2'-O-(2-methoxyethyl)
  modified_base (4)..(4): modified with 5'-methyl C with 2'-O-(2-methoxyethyl)
  modified_base (5)..(7): modified with 2'-O-(2-methoxyethyl)
  misc_feature (8)..(9): modified with phosphorothioate bond
  modified_base (8)..(8): modified with 5'-methyl C with 2'-O-(2-methoxyethyl)
  modified_base (9)..(14): modified with 2'-O-(2-methoxyethyl)
  misc_feature (14)..(15): modified with phosphorothioate bond
  modified_base (15)..(15): modified with 5'-methyl C with 2'-O-(2-methoxyethyl)
  modified_base (16)..(18): modified with 2'-O-(2-methoxyethyl)
  misc_feature (18)..(18): modified with two internal hexaethylene glycol spacers
  misc_feature (18)..(18): modified with 3'-cholesteryl with tetraethylene glycol
tcactttcataatgctgg

SEQ ID NO: 67 - DNA, 18 bp, Artificial Sequence
  Synthetic
  misc_feature (1)..(2): modified with phosphorothioate bond
  modified_base (1)..(1): modified with 2'-O-(2-methoxyethyl)
  modified_base (2)..(2): modified with 5'-methyl C with 2'-O-(2-methoxyethyl)
  modified_base (3)..(3): modified with 2'-O-(2-methoxyethyl)
  modified_base (4)..(4): modified with 5'-methyl C with 2'-O-(2-methoxyethyl)
  modified_base (5)..(7): modified with 2'-O-(2-methoxyethyl)
  misc_feature (8)..(10): modified with phosphorothioate bond
  modified_base (8)..(8): modified with 5'-methyl C with 2'-O-(2-methoxyethyl)
  modified_base (9)..(14): modified with 2'-O-(2-methoxyethyl)
  misc_feature (13)..(15): modified with phosphorothioate bond
  modified_base (15)..(15): modified with 5'-methyl C with 2'-O-(2-methoxyethyl)
  modified_base (16)..(18): modified with 2'-O-(2-methoxyethyl)
  misc_feature (18)..(18): modified with two internal hexaethylene glycol spacers
  misc_feature (18)..(18): modified with 3'-cholesteryl with tetraethylene glycol
tcactttcataatgctgg

SEQ ID NO: 68 - DNA, 18 bp, Artificial Sequence
  Synthetic
  misc_feature (1)..(2): modified with phosphorothioate bond
  modified_base (1)..(1): modified with 2'-O-(2-methoxyethyl)
  modified_base (2)..(2): modified with 5'-methyl C with 2'-O-(2-methoxyethyl)
  modified_base (3)..(3): modified with 2'-O-(2-methoxyethyl)
  modified_base (4)..(4): modified with 5'-methyl C with 2'-O-(2-methoxyethyl)
  modified_base (5)..(7): modified with 2'-O-(2-methoxyethyl)
  misc_feature (8)..(15): modified with phosphorothioate bond
  modified_base (8)..(8): modified with 5'-methyl C with 2'-O-(2-methoxyethyl)
  modified_base (9)..(14): modified with 2'-O-(2-methoxyethyl)
  modified_base (15)..(15): modified with 5'-methyl C with 2'-O-(2-methoxyethyl)
  modified_base (16)..(18): modified with 2'-O-(2-methoxyethyl)
  misc_feature (18)..(18): modified with two internal hexaethylene glycol spacers
  misc_feature (18)..(18): modified with 3'-cholesteryl with tetraethylene glycol
tcactttcataatgctgg

SEQ ID NO: 69 - DNA, 18 bp, Artificial Sequence
  Synthetic
  misc_feature (1)..(18): modified with phosphorothioate bond
  misc_feature (1)..(1): modified with two internal hexaethylene glycol spacers
  misc_feature (1)..(1): modified with 5'-Cholesteryl with tetraethylene glycol
  modified_base (1)..(1): modified with 2'-O-(2-methoxyethyl)
  modified_base (2)..(2): modified with 5'-methyl C with 2'-O-(2-methoxyethyl)
  modified_base (3)..(3): modified with 2'-O-(2-methoxyethyl)
  modified_base (4)..(4): modified with 5'-methyl C with 2'-O-(2-methoxyethyl)
  modified_base (5)..(7): modified with 2'-O-(2-methoxyethyl)
  modified_base (8)..(8): modified with 5'-methyl C with 2'-O-(2-methoxyethyl)
  modified_base (9)..(14): modified with 2'-O-(2-methoxyethyl)
  modified_base (15)..(18): modified with 2'-O-(2-methoxyethyl)
  modified_base (15)..(15): modified with 5'-methyl C with 2'-O-(2-methoxyethyl)
tcactttcataatgctgg

SEQ ID NO: 70 - RNA, 18 nt, Artificial Sequence
  Synthetic
  misc_feature (1)..(18): modified with phosphorothioate bond
  modified_base (1)..(18): modified with 2'-O-methylation
  misc_feature (18)..(18): modified with two internal hexaethylene glycol spacers
  misc_feature (18)..(18): modified with 3'-cholesteryl with tetraethylene glycol
ucacuuucauaaugcugg

SEQ ID NO: 71 - RNA, 18 nt, Artificial Sequence
  Synthetic
  modified_base (1)..(18): modified with 2'-O-methylation
  misc_feature (18)..(18): modified with two internal hexaethylene glycol spacers
  misc_feature (18)..(18): modified with 3'-cholesteryl with tetraethylene glycol
ucacuuucauaaugcugg

SEQ ID NO: 72 - DNA, 18 bp, Artificial Sequence
  Synthetic
  misc_feature (1)..(18): modified with phosphorothioate bond
  modified_base (1)..(1): modified with 2'-O-methylation
  modified_base (2)..(2): modified with 5'-methyl C with 2'-O-(2-methoxyethyl)
  modified_base (3)..(3): modified with 2'-O-methylation
  modified_base (4)..(4): modified with 5'-methyl C with 2'-O-(2-methoxyethyl)
  modified_base (5)..(7): modified with 2'-O-methylation
  modified_base (8)..(8): modified with 5'-methyl C with 2'-O-(2-methoxyethyl)
  modified_base (9)..(14): modified with 2'-O-methylation
  modified_base (15)..(15): modified with 5'-methyl C with 2'-O-(2-methoxyethyl)
  modified_base (16)..(18): modified with 2'-O-methylation
  misc_feature (18)..(18): modified with two internal hexaethylene glycol spacers
  misc_feature (18)..(18): modified with 3'-cholesteryl with tetraethylene glycol
tcactttcataatgctgg

SEQ ID NO: 73 - DNA, 18 bp, Artificial Sequence
  Synthetic
  misc_feature (1)..(18): modified with phosphorothioate bond
  modified_base (1)..(1): modified with 2'-O-methylation
  modified_base (2)..(2): modified with 5'-methyl C with 2'-O-(2-methoxyethyl)
  modified_base (3)..(3): modified with 2'-O-methylation
  modified_base (4)..(4): modified with 5'-methyl C with 2'-O-(2-methoxyethyl)
  modified_base (5)..(7): modified with 2'-O-methylation
  modified_base (8)..(8): modified with 5'-methyl C with 2'-O-(2-methoxyethyl)
  modified_base (9)..(14): modified with 2'-O-methylation
  modified_base (15)..(15): modified with 5'-methyl C with 2'-O-(2-methoxyethyl)
  modified_base (16)..(18): modified with 2'-O-methylation
tcactttcataatgctgg

SEQ ID NO: 74 - RNA, 18 nt, Artificial Sequence
  Synthetic
  modified_base (1)..(18): modified with 2'-O-methylation
ucacuuucauaaugcugg

SEQ ID NO: 75 - DNA, 18 bp, Artificial Sequence
  Synthetic
  misc_feature (18)..(18): modified with cholesterol with ethylene glycol spacer
tcactttcataatgctgg

SEQ ID NO: 76 - DNA, 18 bp, Artificial Sequence
  Synthetic
tcactttcataatgctgg

SEQ ID NO: 77 - DNA, 18 bp, Artificial Sequence
  Synthetic
  misc_feature (1)..(18): modified with phosphorothioate bond
  modified_base (1)..(1): modified with 2'-O,4'-C-ethylene bridge
  modified_base (2)..(2): modified with 5'-methyl C with 2'-O,4'-C-ethylene bridge
  modified_base (3)..(3): modified with 2'-O,4'-C-ethylene bridge
  modified_base (4)..(4): modified with 5'-methyl C with 2'-O,4'-C-ethylene bridge
  modified_base (5)..(7): modified with 2'-O,4'-C-ethylene bridge
  modified_base (8)..(8): modified with 5'-methyl C with 2'-O,4'-C-ethylene bridge
  modified_base (9)..(14): modified with 2'-O,4'-C-ethylene bridge
  modified_base (15)..(15): modified with 5'-methyl C with 2'-O,4'-C-ethylene bridge
  modified_base (16)..(18): modified with 2'-O,4'-C-ethylene bridge
  misc_feature (18)..(18): modified with two internal hexaethylene glycol spacers
  misc_feature (18)..(18): modified with 3'-cholesteryl with tetraethylene glycol
tcactttcataatgctgg

SEQ ID NO: 78 - DNA, 18 bp, Artificial Sequence
  Synthetic
  misc_feature (1)..(18): modified with phosphorothioate bond
  modified_base (1)..(1): modified with 2'-O,4'-C-ethylene bridge
  modified_base (2)..(2): modified with 5'-methyl C with 2'-O,4'-C-ethylene bridge
  modified_base (3)..(3): modified with 2'-O,4'-C-ethylene bridge
  modified_base (4)..(4): modified with 5'-methyl C with 2'-O,4'-C-ethylene bridge
  modified_base (5)..(7): modified with 2'-O,4'-C-ethylene bridge
  modified_base (8)..(8): modified with 5'-methyl C with 2'-O,4'-C-ethylene bridge
  modified_base (9)..(14): modified with 2'-O,4'-C-ethylene bridge
  modified_base (15)..(15): modified with 5'-methyl C with 2'-O,4'-C-ethylene bridge
  modified_base (16)..(18): modified with 2'-O,4'-C-ethylene bridge
tcactttcataatgctgg

SEQ ID NO: 79 - DNA, 18 bp, Artificial Sequence
  Synthetic
  misc_feature (1)..(18): modified with phosphorothioate bond
  modified_base (1)..(1): modified with 2'-C,4'-C-oxymethylene linker
  modified_base (2)..(2): modified with 5'-methyl C with 2'-C,4'-C-oxymethylene linker
  modified_base (3)..(3): modified with 2'-C,4'-C-oxymethylene linker
  modified_base (4)..(4): modified with 5'-methyl C with 2'-C,4'-C-oxymethylene linker
  modified_base (5)..(7): modified with 2'-C,4'-C-oxymethylene linker
  modified_base (8)..(8): modified with 5'-methyl C with 2'-C,4'-C-oxymethylene linker
  modified_base (9)..(14): modified with 2'-C,4'-C-oxymethylene linker
  modified_base (15)..(15): modified with 5'-methyl C with 2'-C,4'-C-oxymethylene linker
  modified_base (16)..(18): modified with 2'-C,4'-C-oxymethylene linker
  misc_feature (18)..(18): modified with two internal hexaethylene glycol spacers
  misc_feature (18)..(18): modified with 3'-cholesteryl with tetraethylene glycol
tcactttcataatgctgg

SEQ ID NO: 80 - DNA, 18 bp, Artificial Sequence
  Synthetic
  misc_feature (1)..(18): modified with phosphorothioate bond
  modified_base (1)..(1): modified with 2'-C,4'-C-oxymethylene linker
  modified_base (2)..(2): modified with 5'-methyl C with 2'-C,4'-C-oxymethylene linker
  modified_base (3)..(3): modified with 2'-C,4'-C-oxymethylene linker
  modified_base (4)..(4): modified with 5'-methyl C with 2'-C,4'-C-oxymethylene linker
  modified_base (5)..(7): modified with 2'-C,4'-C-oxymethylene linker
  modified_base (8)..(8): modified with 5'-methyl C with 2'-C,4'-C-oxymethylene linker
  modified_base (9)..(14): modified with 2'-C,4'-C-oxymethylene linker
  modified_base (15)..(15): modified with 5'-methyl C with 2'-C,4'-C-oxymethylene linker
  modified_base (16)..(18): modified with 2'-C,4'-C-oxymethylene linker
tcactttcataatgctgg

SEQ ID NO: 81 - DNA, 18 bp, Artificial Sequence
  Synthetic
  misc_feature (1)..(18): modified with phosphorothioate bond
  misc_feature (1)..(1): modified with 5'-amino-modifier C6
  modified_base (1)..(1): modified with 2'-O-(2-methoxyethyl)
  modified_base (2)..(2): modified with 5'-methyl C with 2'-O-(2-methoxyethyl)
  modified_base (3)..(3): modified with 2'-O-(2-methoxyethyl)
  modified_base (4)..(4): modified with 5'-methyl C with 2'-O-(2-methoxyethyl)
  modified_base (5)..(7): modified with 2'-O-(2-methoxyethyl)
  modified_base (8)..(8): modified with 5'-methyl C with 2'-O-(2-methoxyethyl)
  modified_base (9)..(14): modified with 2'-O-(2-methoxyethyl)
  modified_base (15)..(15): modified with 5'-methyl C with 2'-O-(2-methoxyethyl)
  modified_base (16)..(18): modified with 2'-O-(2-methoxyethyl)
tcactttcataatgctgg

SEQ ID NO: 82 - DNA, 18 bp, Artificial Sequence
  Synthetic
  misc_feature (1)..(18): modified with phosphorothioate bond
  misc_feature (1)..(1): modified with 5'-amino-modifier C6
  modified_base (1)..(1): modified with 2'-O-(2-methoxyethyl)
  modified_base (2)..(2): modified with 5'-methyl C with 2'-O-(2-methoxyethyl)
  modified_base (3)..(3): modified with 2'-O-(2-methoxyethyl)
  modified_base (4)..(4): modified with 5'-methyl C with 2'-O-(2-methoxyethyl)
  modified_base (5)..(7): modified with 2'-O-(2-methoxyethyl)
  modified_base (8)..(8): modified with 5'-methyl C with 2'-O-(2-methoxyethyl)
  modified_base (9)..(14): modified with 2'-O-(2-methoxyethyl)
  modified_base (15)..(15): modified with 5'-methyl C with 2'-O-(2-methoxyethyl)
  modified_base (16)..(18): modified with 2'-O-(2-methoxyethyl)
  misc_feature (18)..(18): modified with two internal hexaethylene glycol spacers
  misc_feature (18)..(18): modified with 3'-cholesteryl with tetraethylene glycol
tcactttcataatgctgg

SEQ ID NO: 83 - DNA, 18 bp, Artificial Sequence
  Synthetic
  misc_feature (1)..(18): modified with phosphorothioate bond
  misc_feature (1)..(1): modified with 2'-O-(2-methoxyethyl)
  misc_feature (2)..(2): modified with 5'-methyl C with 2'-O-(2-methoxyethyl)
  misc_feature (3)..(3): modified with 2'-O-(2-methoxyethyl)
  misc_feature (4)..(4): modified with 5'-methyl C with 2'-O-(2-methoxyethyl)
  misc_feature (5)..(7): modified with 2'-O-(2-methoxyethyl)
  misc_feature (8)..(8): modified with 5'-methyl C with 2'-O-(2-methoxyethyl)
  misc_feature (9)..(14): modified with 2'-O-(2-methoxyethyl)
  misc_feature (15)..(15): modified with 5'-methyl C with 2'-O-(2-methoxyethyl)
  misc_feature (16)..(18): modified with 2'-O-(2-methoxyethyl)
  misc_feature (18)..(18): modified with two internal hexaethylene glycol spacers
  misc_feature (18)..(18): modified with 3'-cholesteryl with tetraethylene glycol
tcactttcataatgctgg

SEQ ID NO: 84 - DNA, 15 bp, Artificial Sequence
  Synthetic
  misc_feature (1)..(15): modified with phosphorothioate bond
  modified_base (1)..(5): modified with 2'-O-(2-methoxyethyl)
  modified_base (6)..(6): modified with 5'-methyl C with 2'-O-(2-methoxyethyl)
  modified_base (7)..(7): modified with 2'-O-(2-methoxyethyl)
  modified_base (8)..(8): modified with 5'-methyl C with 2'-O-(2-methoxyethyl)
  modified_base (9)..(15): modified with 2'-O-(2-methoxyethyl)
  misc_feature (15)..(15): modified with two internal hexaethylene glycol spacers
  misc_feature (15)..(15): modified with 3'-cholesteryl with tetraethylene glycol
tgtatctcattgtag

SEQ ID NO: 85 - DNA, 18 bp, Artificial Sequence
  Synthetic
  misc_feature (1)..(18): modified with phosphorothioate bond
  modified_base (1)..(1): modified with 2'-O-(2-methoxyethyl)
  modified_base (2)..(2): modified with 5'-methyl C with 2'-O-(2-methoxyethyl)
  modified_base (3)..(3): modified with 2'-O-(2-methoxyethyl)
  modified_base (4)..(4): modified with 5'-methyl C with 2'-O-(2-methoxyethyl)
  modified_base (5)..(7): modified with 2'-O-(2-methoxyethyl)
  modified_base (8)..(8): modified with 5'-methyl C with 2'-O-(2-methoxyethyl)
  modified_base (9)..(14): modified with 2'-O-(2-methoxyethyl)
  modified_base (15)..(15): modified with 5'-methyl C with 2'-O-(2-methoxyethyl)
  modified_base (16)..(18): modified with 2'-O-(2-methoxyethyl)
  misc_feature (18)..(18): modified with two internal hexaethylene glycol spacers
  misc_feature (18)..(18): modified with stearyl group
  misc_feature (18)..(18): modified with symmetrical branching
tcactttcataatgctgg

SEQ ID NO: 86 - DNA, 15 bp, Artificial Sequence
  Synthetic
  misc_feature (1)..(18): modified with phosphorothioate bond
  modified_base (1)..(5): modified with 2'-O-(2-methoxyethyl)
  modified_base (6)..(6): modified with 5'-methyl C with 2'-O-(2-methoxyethyl)
  modified_base (7)..(7): modified with 2'-O-(2-methoxyethyl)
  modified_base (8)..(8): modified with 5'-methyl C with 2'-O-(2-methoxyethyl)
  modified_base (9)..(15): modified with 2'-O-(2-methoxyethyl)
  misc_feature (18)..(18): modified with two internal hexaethylene glycol spacers
  misc_feature (18)..(18): modified with symmetrical branching
  misc_feature (18)..(18): modified with stearyl group
tgtatctcattgtag

SEQ ID NO: 87 - DNA, 18 bp, Artificial Sequence
  Synthetic
  misc_feature (1)..(18): modified with phosphorothioate bond
  modified_base (1)..(1): modified with 2'-O-(2-methoxyethyl)
  modified_base (2)..(2): modified with 5'-methyl C with 2'-O-(2-methoxyethyl)
  modified_base (3)..(3): modified with 2'-O-(2-methoxyethyl)
  modified_base (4)..(4): modified with 5'-methyl C with 2'-O-(2-methoxyethyl)
  modified_base (5)..(7): modified with 2'-O-(2-methoxyethyl)
  modified_base (8)..(8): modified with 5'-methyl C with 2'-O-(2-methoxyethyl)
  modified_base (9)..(14): modified with 2'-O-(2-methoxyethyl)
  modified_base (15)..(15): modified with 5'-methyl C with 2'-O-(2-methoxyethyl)
  modified_base (16)..(18): modified with 2'-O-(2-methoxyethyl)
  misc_feature (18)..(18): modified with two internal hexaethylene glycol spacers
  misc_feature (18)..(18): modified with monothiol
tcactttcataatgctgg

SEQ ID NO: 88 - DNA, 15 bp, Artificial Sequence
  Synthetic
  misc_feature (1)..(15): modified with phosphorothioate bond
  modified_base (1)..(5): modified with 2'-O-(2-methoxyethyl)
  modified_base (6)..(6): modified with 5'-methyl C with 2'-O-(2-methoxyethyl)
  modified_base (7)..(7): modified with 2'-O-(2-methoxyethyl)
  modified_base (8)..(8): modified with 5'-methyl C with 2'-O-(2-methoxyethyl)
  modified_base (9)..(15): modified with 2'-O-(2-methoxyethyl)
  misc_feature (15)..(15): modified with two internal hexaethylene glycol spacers
  misc_feature (15)..(15): modified with monothiol
tgtatctcattgtag

SEQ ID NO: 89 - DNA, 18 bp, Artificial Sequence
  Synthetic
  misc_feature (1)..(18): modified with phosphorothioate bond
  modified_base (1)..(1): modified with 2'-O-(2-methoxyethyl)
  modified_base (2)..(2): modified with 5'-methyl C with 2'-O-(2-methoxyethyl)
  modified_base (3)..(3): modified with 2'-O-(2-methoxyethyl)
  modified_base (4)..(4): modified with 5'-methyl C with 2'-O-(2-methoxyethyl)
  modified_base (5)..(7): modified with 2'-O-(2-methoxyethyl)
  modified_base (8)..(8): modified with 5'-methyl C with 2'-O-(2-methoxyethyl)
  modified_base (9)..(14): modified with 2'-O-(2-methoxyethyl)
  modified_base (15)..(15): modified with 5'-methyl C with 2'-O-(2-methoxyethyl)
  modified_base (16)..(18): modified with 2'-O-(2-methoxyethyl)
  misc_feature (18)..(18): modified with two internal hexaethylene glycol spacers
  misc_feature (18)..(18): modified with dithiol serinol
tcactttcataatgctgg

SEQ ID NO: 90 - DNA, 15 bp, Artificial Sequence
  Synthetic
  misc_feature (1)..(15): modified with phosphorothioate bond
  modified_base (1)..(5): modified with 2'-O-(2-methoxyethyl)
  modified_base (6)..(6): modified with 5'-methyl C with 2'-O-(2-methoxyethyl)
  modified_base (7)..(7): modified with 2'-O-(2-methoxyethyl)
  modified_base (8)..(8): modified with 5'-methyl C with 2'-O-(2-methoxyethyl)
  modified_base (9)..(15): modified with 2'-O-(2-methoxyethyl)
  misc_feature (15)..(15): modified with two internal hexaethylene glycol spacers
  misc_feature (15)..(15): modified with dithiol serinol
tgtatctcattgtag

SEQ ID NO: 91 - DNA, 37734 bp, Homo sapiens
ggctcaagcctcagcctctcgagcagctaggactacaggcacgtctggctaatttttgtattttgggtagagacaggttttcaccatgttgcccaggctggtctatgaactcctgagctcgagtgatctgcctgcctcggcctcccaaagtgctgggattacaggcatgagctaccgtgccctgcctatcttcctcttcatataaagacaccagtcccattatggaggcccccaccttgatgatctcattcaaattacttcccaaaggcctcacctccaatcaacatatgaatttggggattaagtttgtaacatgtgaaatttgggggatacattcaaagaatagcaatggtgaaaaatgatttgcagtctcttctttcactgagattatatactagcagaggacacagaggaaaagtcaaataaacaacatcatttcagagaatggacacagaaagctcagtcaatcagagactagctcctaaccccatctttctcatggcaaaggatattctgtcccctctctcactgtcctggaatgaaatccgtggccatttcccttttctcatagccaaagacaccaccaagttctccaatccctgactctgattcctgacatcaatctattgctccttgtataatcagtcaatgaatcaaaaaaaatttttttggatatctactatctcctcaggatgaggctctgtcaggggaaaagtaagaacccagagaacaagcaataagcaaagcagcctaatgttgacatgcgcttggcaagtattcacagaccacctcacacccagccaagcactgcaggtgagagcaacacaggagtgaggaagccggggtacttaccatcagtgaggaccaatcttacagatagggaaaaactatatttcatccagttgaagacacccattttctacattttaaaattcctaaattaggctttatctttcaatgattttggatcattggatgaaatacagtaacaacagcacaaagcagcattgtgccctgagaggtgtgcagagcctatagcaattagaacagtggtccaaggtcaggctacacattagatgtatctgggaaactcaaaaatacttatgcccagaccccatcgcagaccaacagaatcagtgtggaagggtgtggctgtacactggtatttcaaaaagcacctcatgggattctaatacgtaggcagagttgagaaccaggatagcaatttcaaatgagagtacacattaccctgaggttacatgaagactttccaaggggcacgccttggaaagtttagggcacacatcagtaaactagggcctatggcccaaatctgttctactgcctgtttttgtaccctccggggagctaagttggtttttacagtttcaaatggtcaggggaaaaaatcaaaagggaaataatatgtttggacaaatgaaaattatatgaaatttaaatgtaagtgtccataaataaagttttattagaacacagacacactcctttgtttacatattgtcaatggcttctacaagggcagagttgaatagttgggacagaactatatggctggcaaagcctgaagtatttactatctgatactttccagaaaaaaaaaacttgctggccctggcttgaagggaatagatttgaagggaatggacctccagaatctcaacatccccatgtcctcttccagacacttgcctgccaggaaaggtaccagctgtgaagatgtcaggtgtgggtggaggctcccttccttccccacacttttgtttcctacttgtccttctcccactttcaaaagaaaggtaggcctctcatcagtcctgggtattaagtttctaacatgtgaaatttgggggacacattttagaatgtgtaaaaaagcccctgggggcccagagcagtggctcacccctgtaatcccagcactttaggaggttgaggagggcagatcacaaggtcaggagttcgagaccagcctggccaacatggtgaaaccccatctctactaaacatacaaaaattagctgggcgtggtggcatgtgcctgtaatcccagctattcaggaggctgaggcaggagaattgcttgaacctgggaggcggaggttgccactacactccagcctgggcgacagagcaagactccatctcagaaaaaaaataaataaaataaaataaaatttaaaaagcccctgggcactagacatagcaacagtaccagataccattgtgtaataggactctgatcacaggataggtatatacacatatcgatatacagagatagatagatagatagatagatagacatctatttttttgcaagtgaggtaggttccaaatattgccttactaaaattgaaggaggacccaatcaagttgtcagttgccaaatcaaaaatatttgactgggcacagtggtgcaaacctgtaatcccagctacttgggaggctgagatgagaggacctcttgagccctggagtttgagtctagcctgggccgtttagtgagaccctatttaaaaaaaaaaaaaggtgacaagatggctatgtgatctttgcatatgactgaaaacgggttcaaagaattgatgagacaaatataattatttatgtaagcaattttttaaggcttacatctaaaatatttttagcctggggtggtagctcgtgcctgtaatcctagtactttgggaagctgaggcaggaggatgacttgagcccaggaattcaagaccagcctgggtaacatagtgagaccctgtctcaatgttttaaaaagaagaaaaatggtggctcacgcctgtaatcctagcactttgggaggccgaggcgggcggatcatgaggtcaggagatcaagaccatcctggctaacacggtgaaaccccgtctctactaaaaatacaaaaaattagccgggcgtggtggcaggtgcctgtagtcccagctactcgggaggctgaggcaggagaatggactgaacccgggaggcggagcttgcagtgagccgagatcacgccactgcactccggcctggatgacagagcaagactccatctcaaaaagaaaaaaaaaaaaagaagaaaaataaaatatttcttaaatgctgaatgttgctttgttctatgaataagcaatatttgttcacagatacatcaactaattaggaataaaatgaatttcaagtaattcatgtttaattacttattaacatgtattatatttacattattttttatcaattatgtactaataatggcaatgatgaaatgaagatctcagtgtcttgcactgggcagaggcctttctcattctctgccacttgggccccagcatggcttccctaagagctaggagctcagagggaggggctgggcaagacagaagtcaggatctttttgtaacttaatcttgtaagtgacatcccatcatttttgtcttcttctattcatattctattgttagaaccaagcctctgggtccatcccacactccgcgaggaggattcagaaggtcgtgactcccagggggtgggatcctagaacacatcttagaagctgcctacgacaaccgctgatttttaagtaacagttacatcctctacatctatttagacttaggatggagaattttagatgtcatctttaaaatgcatgagaggatgcagttttccaaaattcttttagaaacagacaatttgaaggccactgagcttcaggcttcattcagctgggtcgtgtctgcgggcggggctcatagagatgtcgctgggggtcagcgggtgcttcgggcagcgaaaaaacccacctctcgagggcagtggaaaatacagggaaaagccacttgagtgtagactccgtgcgtgtcaaggccaggcagaggcgcacttgataggcaaggaaaagcggacggtggtggtcttgggaggaagagaggagaggcgaatgggcaggagcgtgtggatgcactagggcaggacgggctcgaagcaggaacctaggatagaggcagcgcgggccggcttgggagggtcctccagggtccggagaggagaggacgcaggctgcacgcgtgctaagaaggagactcatgaaatgtgtaattcgctggcgacagcttccgcggccgtggagtgagcctctgggaagtaacgactctcttaggtgcggctgggacacagtctcacagaccaggtaagttgcctgccctccaggaactcaagtgtccccgagtccgagccaggaggctggaagtgactgctgtcccatcctccctggagcccggagctgtccttgtcttgagaaagagaaagcaaagccaaggaaagcagagcgagcagaaccaggcaaaggggtggggacaataaaatgggatatggcccgcgcttccatctactcaggaggcagaggcaggaggatcgcttgagcccgggaggccgaagctgcagtgagctgcggttgcaccactgcactccagcctgggagacagagggagaccctgtctaaaaataaagtaaaataaaaaacaaaaataaaagggacagagactaagaaaacggacttcctgaaatcccaagttgggatttcacgtccagtgacccacaagagaagcaagaagtctgaacagggccaagaatcaagtgagtgggggcggaggattaaaatcgacagttgctgcggcacggccagggtggagggtgcatgtggggcaggcgaggctccagctggagttgacgctagcccgacgcgggtgcaactggaggcgcgacgggccaggcccaggagcagcgggaggagcgcacctggggcgcgcgggcggaggagggccggggagggacgccggaaggactgggtagggacgcccggaggactgagcgtagggccgagaggaggggcgcaaggaggaacggggggagggccctgtctcaccctaaacccctccccgtcccagactaaactcctcccctcggcccggcccgcccctgggcccgggctggaagccggaagcgagcaaagtggagccgactcgaactccaccgcggaaaagaaagcctcagaacgttcgttcgctgcgtccccagccggggccgagccctccgcgacgccagccgggccatgggggccgcacgcagcccgccgtccgctgtcccggggcccctgctggggctgctcctgctgctcctgggcgtgctggccccgggtggcgcctccctgcgactcctggaccaccgggcgctggtctgctcccagccggtgagactcgacgtggggagcggtagccgccaggatgctgcggacgcggggcaaggtcgcggagggccggacggtcgggactacgcgcccgggctggggaggcaggaagtccgcgccgcgggcttagaggggctcagagccttgggcacagatatcgcggcgcctggggaggaccctcggagcggtgggagttgcggtgtggaatacggggggggtgggtggcacatcgcgcggcgcgtgttgcacaacctggcccgccgtcgtgactggaggcgggagtgacacctccgcccgggccgcggagttcggggaaggagggcgcggcgctgggccaggccggaggggcggccagggctgatagaaaggggctgtggagaaggggcccggggaggagccaggacgggtctggacccagctccacgccttgcgcccctcacgtaccccggcggggcacggtcggccctcgggaggcccatcgcgccctcgggagcttccctcaagccgtgcccttcatgccgccgacggagccgggcgagcccacgtcgtccgtgcggaaggtggagtccctcacccgcggcccccagagggaccccgctgtcgtagagccacgcgggggccggagcgctgagacgcggcaccatgtttcggggagagctctgccgagggcggctgagggccacctccccagaggcgcgaagccctgaggatgggcagatggttcttaagacggcgcccttcccgccactcccacccccgactaccaccacctgggtctgggaacccggtgagagcgcagtcggagggtcgaacgtttgtagctgtcaagtcgtagccccgctgcgcccacaggaagtgacccacccgcctgccgggtagtggcctttctgtgagccaggaccatcttaaggaaaaaaacaaaaaaagagcaaaacgccgtgcccctccacaatatactctcctcttccccgcatccccgaggggatctttcctcccctccacctccacctccacctccaccgctgaccccaaggaataatgctcagtatctgagtcagaggatgtaaaacaaagggatatttctccttatgtagttttatggaggatttaccgaaagaaggtggagggtgagtgactatgtcgcagaaaaaaaaaaaaagatgtttttatcgtgaatgatgttgagaaatgtcctgtgacttccactattgggcaaagcaggtccctctgccctgctagtccctcctgcaggctgtgtatgaagcgttctgatatggagggttggtgcgcctgggttgacagccattggtcaggtgcctgcagagtacagggcgccatactgggaactggaactataaataaatactctggggaccctaatatccagagacctaacccatctacgggaggaacaaggcttgaagttagggaactgtctagcaaagctgcttgcacaactgctaagtgtacggaattccaggaaaaagaaaaattgcttccagttggggtgtccttcatggaaaaggcatttgggcagccctgtgggggtagcaggagcattccaggtggtggaaagggcctgagccaaggtccttaagtgggacagggtacggtgtgtggccggaatggagggtctgtgtaataggacagtgagaaaagatgccagaagcggggatgggactctgctgtgcgtggcgtgggagccaagctctgactttcactgcacagtgaagcaactgtaagtcaggagcagaagcacggcctggctccagggagggctgaagagagacacttgctgttcatatttgtctgcagtctctcgttctcttccttcctctctctctcttctgtatacacctgcctcacagacagctcttctccagagatagacagctctgggctccattgactagttcttttaaaaagaaagaaaacacatccttcaaatttctgtccctcactggtgttttagtggatgcaatgtggtatagtgaggggagggaaggccacagaggtggccagaggacctggatttgcaggcagcatcgcacttactgtctctgcagtcgggctttgaggctgcctgggcctgggttccctcatttccacaaaggcaggactgggtgagccttctcaaagtaagtccatgccaccttccagaatgtaagtgtctgtccaaagcccagttcgatttagccttccataactatcctcagacagggaggaggcttctgcacacctggcctgttcctagctcagtgctggagcacaggatgcgggggctatttgatacatatgtgttgactgaacaaaagaatgcatgaatgaaggaaagaacggtcagctctgcttggaaggtagtggcaagctgagaccaaccatagcaatggttccagatgcttggggttagcacctcaaaacccagatgactgatttccccacagaaatcattacacgagaaaccatcaataattgcatttccctgggagtttccttttggttagccgttctcgctgcctaggcttcatgcaggtttcccatgaccgccagcctggaggaatgcccataggaaagacagcagcaacttaagagttggtcagggtaaatgttaacacgtaatttcatagacaggatgtgtatttcattacagagtcttttttcctgagcgtttgcggttttgacttgtggttgtagaacagctgctcagtttaacccctttatcttttgcttgccagaagccactttcatcatgccactcttccagaggctacaaagttgtgttctttgtgccaggcactgtgccggtggctcacaagtattccttcatcccatactcaacgacagcttacaaggttggcaggatgaacctgcttttgagaggctgggttattggcccaaggtcgcacagctaatgagtgctaaggtgagattgaaagcaggctgtgcttgtaagttcaaagcccactttctctgtcaggcactcagtagtgttcactgaggcacagaattgaatacaatcttccatttcttcctcttaaccttcaccttgtgggtagagaatagtggcctattggaggtatcccttatttatttatttatttatttatattttgagagagttttgctctgtcgcccaggctggagtgcagtggtgcgatctcagctcactgcaacctccgcctcccgagttcaagcaattcttgtgcctcagcctcccgagtcattgggattacaggcgcccaccactacacccagccgatttttgttttttgtttttttgacacagaaagacactgtcgcccaggctacagtgcagtggcatgatctcggctcactgcaacatccacctcccaggtttgagcgattcttctgcctcagcctcccaagtagctgggactagcaggcatgcaccatgatgcccagctaatttttgttatttttagtagagatggggtttcaccatattggccaggctgatctggaactcctgacctcaagtgttctgcccacctcggcctcccaaagtgctgggattacaggtgtgagccaccgcacctggccaatttttttatttttatttttattttgagacaaggtctcactctgtcatccagattggagtgcagtggtgcgatctcagctcactgcaacctccacttcccaggctcaagcgattctcctgcctcaacctcccaagtagctgggattacaggtgcgcaccaccactcccagctaatttttgtatttttagtagagtcggggtttcaccatgttggccaggctggtctcgaattcctgacttcaaatgatctacctgcctcggcctcccaaaatgctgggattacaagcgtgagccaatgcgcctggccaattttttaatttttttagtagagacagggtttcaccaggttggccagactggtctcgaactctttatctgcccacctcggcctccaaaaatgttgggattacaggtgtgagcaaccacacctggccccttttgttatttagagagacaaggcagcagagattaagatcatgtattctggagcaaaacttcgtcatgcaaatgccagctctgtgggaccttgagccacttacccaacctccctgggtcttagttttttcatcagtacaattgggataagggtgcttagctcataggattgttgtcaagatcaaatgagatatatgtacaaagtgcttagcatgatgccagacacaaaagaggagctcaataaacatcagctgccatcaccttcattgtcatgacaatcccccctctgatttctgcaagatgcctcacgtaatgccattcacaagcaggtagctcatagataatattctgattctgctagttttaaagaatgggcagtggccccacgcctgtaatcctagcattttgggaggctgaggcaagggaatcacttaagcccaggagttcaagaccagtctgggcaacatggcaaaaccctgtctctacaaaaaatacaaaaattagccaggtgtggtggcgcatgtctctagtctgagctactgaggaggccgaagtgggaggatctcttgcgcccaagaggtcaacactgcactgagccctgagcatgctgctgcatgacagagtgagaccctgtctcaaaaaacaaacaaacaaaaaaaaaaacgaatgagaggtttgaaattagggatgactattggagaggaatttgttggacaagacaagatatgtcttagtaatatcctaagaagatcccgaacactttttttttttgctttatttaaaatgttatgtaattctataaattttttttttcttagagacggagtctcgctctgtcacccaggctggagtgcaggggcgcaatctctgctcactgcagcttctgcctcctgggttctagcagctctcctgtctcagcctcccgagtagctgggactacaggcgcacgcctccatgcctggctaattttttgtattttagtagagatggggtttcaccgttgttggccaggccagtctcgaactcctgagctcaggcaatccacctgcctcggcctcccaaagtgctaggattacaggcgtgagccatgaaattaaattataaggaaaaaaatgtctactctttcttccactaaacaaattaatgttttcattcatttatcttacttttcagtcctttcatttgtttggcattacatcatagataaacttctatcttttaattaatttttgtcaagttacgtatggtgatcctcctttaaaaatggtactaagatgtttaaaacaaaaaacagtagatccctgcgccacccctaaacctgctccccaaatatgattcctttagttaattcttctgagatatacctccatatttctaaacatgcttatagtgttaattcatgatttgttaattttagatattatctattgacttctaatagatgaaaattacattatctttctgccaccacttctccctgttttttattacagttaaatcatgattttagttaaattaatagtcagcatttatataacaattaagtaatcttcactgctgaggcaagtaagtgtactttgattatatattttttctggtacaattcccctcccctcctgccccagagataataattgctttaattcttcacttgcataatgtttcatgtaactagtcttagttttgttctatcagacttgtcatatcatttccctccaaatcatcagatattccatcaattccatcccccgctttccccagagaacttcctcctagagcacactgttctccagccccagcaaggtctgtgctctctagacctgtggcacaacaggtctagaccagaacagacatcctgtcatggtctaatctcccatgtcctggatcctgtgtcttcttcctcaggggttactccctcattttgctggagaatatcatcctgtaatttcctaagcatatgtatgagggatggatatagacatatatatcaggaacatatatgttaagtcttttcatgtcaacatatctttattctaccctcatacctttttctgataatttggctgggtgtgaaaattatgtgttaaagataattttccctcagaattgtgaaagcattgctttattgccttctagcaaacagtacagatgctaagaaagtcaatgttattggccgggcgccgtagcttacgcctataatcccagcactttgggaggccgaggcgggcggatcacgaggtcaggagattgagaccatcctgtctaacgcagtgaaaccccgtctctactaaaaatacaaaaaaaaattagccaggcgtggtggtggcgcctgtagtcccagctacttgggaggctgaggcagaagaatggggggaacctgggaggcggggcttgcagtgagctgagatcgcaccactgcactccagcctgggtgacagagcgagactctgtctcaaaaaaaaaaaagtcaatgttattatgtgtcttattggtttatatgacacttatttttttctctctggaaacttttaggatcttctttttattcctgatattacaacagtttcaagatttggggccttggtctgggtcttcgttgttgtttttgtgcaggccatttagtaacctttttaatttggcaacgtgatactgtgaaatatgtatttagtcttcaacccctttttctggcatagaactcctaaaatccttagaatctccaaaattgtatcttttatatactaatgattcattggtggctggcagcctctaggcagcttcaggatgggggctggtcccgggaagcaagttaggattagagggctgggacgtttagccccacccctttacccatcacatctgggaaggggagagggaactgaaggccccctgaagttgcaatggccagtggtttaatcagtcatgctcacatgaagcctccataaaaacggggttcagagagcttccaggtagtggaacatgtggaggttcctggagggtggcacacctgaggagggcatggaagctttgtactccttctcctatacctcaccttttcttctgtattatttgtgatatccttaaaataaactgggaaatgtgtttccctgagttctctgagcagctttagcaaattaattgaactgaaagagaggagcatgagaatctcacgttgaacccggttggtcttagaagttctggaggcccagacttaccactggtgtctagggggtgggcggtcttggggactgagcactcaacctgtgggatctgatgctatctccaaatagtgtcagaattaaattggaggatacccagctggtgtctgctgccgaattgattgcttgcttggtggtgggaagaaaccaccccccgccaatatgtagtcacagaagtcttctgtgacttctgttgattgttgtggtgatgtgagggcagaggaaaaatacagcttgagtttttccacactctcggggaatatgtgtccttctcttccagaatattttctttctttccttttttaaaaaataacttcttccttctgtttttttgttaatctccttctagaaatctagtcaatcatattttgtttcctaaattgaatctctaatgatcatatattttttcctattctatttgtgctttcagagaaatgtcctcaatttcatagactaacccttctattgaatttttatttagtagaacttctattgagtttcaaggttcagttttcattctctgcctgctcatttgtccatggtgtcctgcccctgtcttacagatgcagtgttgtatctcttcggggctataataattttacttgtttggtttaattgtgttaacagcattgttttttttttccttccaggagcattttttaattgttttgatctatttttcatacagaaaacctatctcaaatatctggtactccttggctgtctgagaatattttaagaatgaagtcctaaaagctgattaaatgctctgtgtagttaaggtttattgaacattggacttcactgtataggaggtcaagctaatcgtgaacctggcctattgggtgacctccaaatgctgaaatctggaggtgttttttttgggcctggctgccagcattctgagatcagagcacggaaagagaggataaggttcccaacactccatatgtagaccttcacttaattctccctgcccctaagccctgaacgttataaggttctgaggggcccctggcctccttatcaataactcccttttgtagcattcagacagaagttcctccactcagcacaagccagctgcctactctgctgccacttggacagttatttatttattcattcatttgttcatttttgaggttttataattttatttgacatcaacagtttgttctcatccacaatgtctgactgtcagtttctgaaagtggtaatgggtacacaggtaaccaaagtatagagcttgcttggtgaatcttcatcctcatgctttctggacagctgcacatggacacagtatggaacgttccttattcctttggtccagacagctttgttgagcctggtgttagcatatctggagtccccatctccttcatggcaaagttctgggactttttgagtgaccaaggggcacactgcttgacgtcccctccatgggtgtgcttgtggatgctgatggcatattctggtgtcaccacctcattggtggcaggtgacagaatagcccttttattttattttatcttactttattttattttattttattttatttagacagagtctcgctctgtcgcccaggatagagtacagtggcacagtcttggctcactgaagcctctgcctcccaggttcaagcaattctcccacctcagcctctcaaatagctgggactacaggcacatgccaccacacccagctaatttttgtatttttagtagagacagggtttcaccatctcttggccaggctggtcttaaactcctgacttcaggtgatccacctacctcagcctcccaaaagtgctgggattacacgcatgagccactgcgcccagccaacactcttctttacaggagctatgctgctggggccaagttggaaaggacttttaaaattttgttcacatcttttgtccactgagtttggctctttgagtttgagaatttacaaaaaaaaatgttctttcctataattgttatattgtttggagagagggagaaaatatgtgtatatggtcaatgcgctattacctctaatagaattgttattctatatttcacctatatgtatatttttcagttttgattaaatcttttttccccttatcttccctcatgccatctcctctgcttgtgtgccctttgcccccagcaaactgtgttaacacctgttaacatgtttctattctcatttagtcatacacacactctctctctctctctctctctctctctctctctctatatatatatatatatatatatatattcagggagatctttttcatgacttatttccatagaaattgggatcatactataaaaagttatttgaaacttattttcctctctcatcaacacattccagccatctgcaggtcaacagatgtctatgcaactaattctcattctctttaatatttgcataatattccatagtagatagcaatctattcaaccatttctagtttgatggacatttagatttaaactagatctcaccttaattcagccattctctattgatgaccattcagtaccacagaaaaagagggaaagctgtccattttttttaaagctagtataagcttaattctaaaacttgacaaatcttatacaaaaagaaaaactatggaccaatctcatttatgaacataaatccatgcaattctaaataaaatattagcaaatgtaatctagcagaatatcaaaagaacaatgcaccataatctagtggtgcattaacaaactttgtttgttaatcagtgctggagaggtatatgatgaggttcagagctgttttgaatgaaaactataaacctaatagtaactgaaggaaaagacttatatgcaaccacaactatcagaaaccaagaccaaaaacagtattccatagggcataccaaactatttccctccatctcgggaatgagaggacacctgcctgcaccactgggaatcaaccaagtgtgttgtcagacccttccactttccttgtggtcttcatgaagacaagagcttttcatcatgggcatcatcctgcagtgttattgagtagctcccagtggctagtaggaagttactccaaatgatgtatctgtttgccttctctagaagagttccccatctcaaggtgaaataaccgctttttttttatcctccacatcctaggaattttaagggagaggaaaaatgagaggactcaggggagttaatcttctcgccatttaggaaagagtgacatttattagtgtgagcctaggcagccagatggattttgttgggaacatgtgcggagccccctagtggggtggtgatgctagcccgggacctgtaggggagaattcaggagctgaacagggcgagaagcacttatgaactggggtcccagagaaggagggtccaggtgaaatagcttgctagagtcaatcctaggtgcgtgcagatgtcatcctgtgtgtgaccactctgtaaatgaaccctggtggcacggggtcttctcctgtgcttagccctacctctctgttccctctcaagagagaggagggtgtcagccctggcaccctactcacaccagtcactttgttggccttgagattgtgtttctggtctgcctcagcatctgactttccaccccgggatgcgtttggtctgttttgccagttagagaactggagacacctgagcctgagctccttcctaatggttacatttccctggtagcatttgtcactagggcttctaaatttggccatcaggatttcctcaggcttggaaggttaacacatactgcccaagagggaggcaatataatgtaacatgggtgcctcagcttcctcatctgcagaatgggctgaggataatacctcgtcacgatcacccggaacagggcctggcatactttacctagcgactttgtagggacttagtgaatgttccccaacagatctgtcacagaaactgtaaatattgcccttcaccccttccgcacctcttgcagcagtgttatccaggaaggttggaaaccttaggagatgaaggggcccttttctcagggcactccaagagaaccctctcagtgtcttttaaaattgtcaaggtcccagctcatagcagttcctcataaaataccattcctgtgccgggcgcggtggctcacgcttgtaatcccagcactttgggaggccgaggcaggcggatcacgaggtcaggagatcgagatcatcctggctaacacagtgaaatcccgtctctactaaaaacacaaaaaagtagccgggcgtggtggcgggcgcctgtagtcccagctacctgggaggccgaggcaggagaatggcgtgaacccgggaggcggagcttgcagtgagctgagatcgcgccactgcactccagcctgggcgacagagcaagactccatctcaaaaaaaaaaaaaaaaaagcaccattccctttgccatcccctggactcactcctcatcctattccccaaaaagtgagaagggcaggctgtgtagatggcattcctgagaatgagccagtggagagcatctggccctggcatgtgaattcaagccttttcccagctgtaataaccaccctcttttttccacaggggctaaactgcacggtcaagaatagtaagtcatctttttctgttcttcttcttgttgccttcttaatcaagtgagagcctgctgccaacttctgacagaagtcttgccatgccactccaggttcaggctgtgagctacagccatccgcaggagggttcccggagaattgtggatgcgtgcacctgcgcttcctgtcgagaacattcattatgcaaaagtcaggaaaggagaaacagaactgtcatttggattgtgaaagtattctctggggagctgccctactgtatctataatataatttgatttgccacagcttgtcactgtaaagtgagagacatctgtgctgttgattttgttttgttttaattcaaagaggcacatattcaagtgtctgagccaattagagacccctgacatataacaataaagcagctcttactacaactgcatccctcctgtgcccttattcccaatcacaacttcttctcaaaatcaacttgtgtactttgtcttctctcctaaaattccctttagacttgagaggtttgcagtgaccccagtaaacattagagaagagggagcagggcagtaaagctgaggacgcggccaagggccacaggctggaaggccgcgggcccctgagctgtttgctgtctagctgtctgtacctgctgctggggcatctcagggtctcggctataagtctctgaatgttgcttttccctggctgccaggtacctgcctggatgacagctggattcaccctcgaaacctgaccccctcctccccaaaggacctgcagatccagctgcactttgcccacacccaacaaggagacctgttccccgtggctcacatcgaatggacactgcagacagacggtgagtgggcatgccagcagggccctgggggattctccctgcctccaagtggctctcccagtcaggctcaggattgggctcccagtcctgtgctcagacatgggggttcaaatttagtgctataaggatccgtcatttcatgcagtcaaatacttgttcagcattttagatattaacccacagtgataccttctcatcacaccattcttcatgaaaggacttccttcaacctaatatttttagcaccctgaggggaaaaaaaagcaagcagttaattttgtgactacagtaccaaaaatgaagtggaaaatggtaacacatttgtcaacctgttccctgaatttaggggccagcacttttaaaacgtcccccaagcctattcaggaatggagagtttatgttacagaattgggacgattggggcttatgagcactagccccagatttgtgaacggggcatgggggaagttctttttggaagtccccgccctcagtgctcctgctgacagccacaacctcgtgaggatggtggggatggctgtgtttgacacccatgccagattgtcaaagccctcaccacaagtttgcaaagcctttacttctagcccagtgtaaagtgtcatttttccttgcccagctgggaaataactgtctgcaaggcggtaggctgaggccagagagtgaactgaaaggaacaggatgtggagagttgggtaagacggcagattttcttttaggagtgaacaaccgcaacagatagggaagtgacacacccagcacttgtcttggctgatctgcatctgtttgtcttctcttctccctctcctgcagccagcatcctgtacctcgagggtgcagagttatctgtcctgcagctgaacaccaatgaacgtttgtgcgtcaggtttgagtttctgtccaaactgaggcatcaccacaggcgggtaagaacacagctcctgagtggattatgttccactgatgacaccagtacagacttcttgtccccaaattcagaccctgatttagagtgggggagacccagaggtgctgagggagtctgtggaattcagaatggcagcctgagatgggcagaagtcaaaagagaagtggtgtggccgccgtgagcaatagtgagggacagagcgtatttttgaaagcgtccctcacctgctcacccctggtttttcttcccactttacctagctattcgttcggaaaggaagttgaattggaaggcagcttccacagccctacctcctgccatctttgtgtaactttgtgtaacatcttttatgtgtaacttggattcagctggggcctaccttcaggaagaaaaaaccgcccagaccaaagaactgctgtaggtgggcaaatgagcactacaacagcttagtctcattttgctgctcacagctaaatggtgaaatgttgattcttgtttaagtttgtttaaagcagtgggtctcaaagtgtggtccgtagaccagcagcctcagcctcacctgggaacgtggtagagatgtttggccccaccccagacttcccaggccagaaactcttagggtggggtccagcaactggtgcttaacccttaagtcatcacgatgcgagccttagtttgaagactactggtttaaatctgcaaatggtcacttgaaaacaagttagatctcccacaaactcaagcagcaaaggcagaacccctctccgatgttaaattaggacccccaaacttgactgctatgcgaatggtgagaaccaggttcctccgtccacttagaagcaaaggaccccggcccctccaccagggtaactagaatgggggttggagtcgatgtctgtaatctctaacacccagaaaataacttagcacaaattcaaatatcattgcaactgaggtgcctgctggcccagggtgagtgggggtctctagcttgtcctttgcacctttttactccataatggtctcaagaggttcctggcttttccgtttgaggaggaagaatcatttgacaaatagtttttacctgcctggcgtgtgccagatctccatagccccaagtcccctggctccgccctctcatacccattgtcctagaatttgagagggcaggtgggaggggtgggactacttccactttccccaaattcttttgccttattcactgtctactgatgaggccagatccaggtttaaaaaaaaaaaaaaaaaaaacaggcagaaaggaccagaggaaacaaaaaacaaagatactgatttccctgaccttggattttgctgtggttgttgctttgttcttatttttggctgaatattcgggagtgggtgggaacgggggtctttgggcatagatgggtgacagaggtgtgtgtaatccatccaccttcccttcctcccttctcttcagtggcgttttaccttcagccactttgtggttgaccctgaccaggaatatgaggtgaccgttcaccacctgcccaagcccatccctgatggggacccaaaccaccagtccaagaatttccttgtgcctggtaagagcatcctcccaagacattccctccccaatggcctctgtgagaaggaagcaccaggtggcacagatgccagcccccctgctcagcaagacattggctggcattgccagcacctgggacccacagaacaaacagaggccaagactgggagtgctttggtgtgtgctgcaacctccattccctgaggcagaggccattctctgttggcacaacagtggacggtggcccaagatcccaggagttttatgggaaccagagcacctccctctatctagagaagcacccagcctgcccagaaaatagcataaaggcaagccacaagccactcgtggggaagttgcagcctctgcccccagcctggtcccagcctccgtggcttgctcttctccttccaccttacattctgcctgcatcatccaacgttcatcccatgcatggcgctctactccccatgcctatccacactgcctgtgattaccgccaggcttttcttctcaggcatcctttgatgtacatgtaccttctacttctctgtcctccccagaagctcagctattacctacatttctctctttttgtttttaatagagatagggtcttgctttgtcacccaggctatagtgcaattttgctatcctagctcaatgcagcctcgaactcctgggctcatgcgattctcctgcctcagtctctctacaattctctgtccatagccagctatgtcaggaagcccacttgaaaacaaagcctgggtcttctgcccatttttataatctccagaacctcacgaattgccttgcatatagtaggttggtcaagaaatgcttgttaaggatggtgttgaccttcttcatcctgggaccaccctgcacacacgcgtgcacacacactctgtgcttaccctgctttatgtcaccgcgtgtggctcatcactccctgactggtactgcatgctgtgtgtttgcttttattggtctcttctactgggttgcaatctccagggggcagggctttgtcttgtttaccactgtacctccagtgccaagaacagggcctggtgcatagttggtgctcaatatgtatttgttgaaggagtgaatctcctcagttctcgcttctgttcctaaagttgactgactcagtccctgtccctccatggtgattcacacctgtcacatgtcttctcagcctgtgcaaagacaggggcagccggggacaagaagctgtgggtgggcagagaaggaactggaggggaccaagattgcttggtcacccacagcaagctcaggaggaatgcacttgcatcaggagggttccccgagagatgaggatcagacaggcaggctggcacccatgccaaggtgggtccagccctggagctcactctgaaggggccacctgcggacaggctcccagtggggaaaagattgttgttcttggtgtcaggagtctggaagaacagatttctgaaggcagaggcttaatgagtttccttttttctgggtcgacagactgtgagcacgccaggatgaaggtaaccacgccatgcatgagctcaggtaacagctggcccgggagagctttatttggatgcatacacatgcacatgtgcgtgcccctcctcactcccagcctgcgtgtgtgaccttggcaggcagcctgtgggaccccaacatcaccgtggagaccctggaggcccaccagctgcgtgtgagcttcaccctgtggaacgaatctacccattaccagatcctgctgaccagttttccgcacatggagaaccacagttgctttgagcacatgcaccacatacctgcggtaactctgctctttttgacccctctagcatagctcaggaccacccctccaagccctgagtctcttctctgctggtctgacagaaccgcgttgctagaagctcgcgactcagggctgtgcttagtccatagtgatcatggcgccttgccctttttcttccccagtgatcttatgcttgatagaaaggcagttgactgtgtcctgcccatgactcagtcctttttgttctttcctcccccacacgcccccttgttctctttttgttttgctttgtttattacaaaaaggatttgaggatttaaaaaaaagaagaaatgtgaaaatagagacaaaggggaactaaagataaggaaataaggccaggtgcagtggctcccacctgtaatcccaatactttgggaggccaaggcaggagaatggcttgaagttggagttcgagactacagtaagccatgatggcaccactgcacccactctgggggacagagcgagaccctgtctctaaaaaagaaaataaaaattgaaaaataaataaagtacattaatgacataaaatatgccaggcacagtggttcacgcctataatcccagcagtttgggaggccaaggcaggtggatcacttgaggtcaggagttcgagaccagcctgaccaacatgatgaaaccccatctctactaaaagtacaaaaattagccaggtgtgctggcacacgcctgtaatcccagcaatttgggaaactgaggcagaagaatcacttgaacctgggaggcagaggttgtagtgagctgagattgtgccactgcactccagcctgggtgacaagagtgatactccatctctaaaaaaaaagaaataaaggtaatacgatgaagccagctcagtgcaggaaacgtgtgctgtgtggttctgtacaactggtgtccatgaacacagatttgttgccccaattcccagcagccaaagcaaagagagacttaccagttactacacgtacttaaggatttacaataaaccagcttccatgcagaaacggagtttttttctggaatagaaacctgaaaagcatttctcccctggccttcctaaggggtgctctggacagcctctccatggcagtgccacagcgtgttcttacccaactagccttacccatcccaactagccttacccatcctcgcctctctcctcagcccagaccagaagagttccaccagcgatccaacgtcacactcactctacgcaaccttaaagggtgctgtcgccaccaagtgcaggtgggtgagtgtggtgtggacaggtgcagggagcaaaacaggtggcaattatagagtggacaggagtgaggagtgtgcacaggtgaagagtggtgtggacgggagtggggagtgtgcacaggtggagagagtggtgtggacgggagtggggagcgtgcacaggtggagagtgtggtgtgtctgggagtggggagtgtgcacaggtggagagtggtgtggacgggagtggggagcgtgcacaggtggagagagtggtgtggacgggagtggggaacgtgcacaggtggagagagtggtgtggctgggagtggggagcgtgcacaggtggagagagtggtgtggctgagagtggggagcgtgcacaggtggagagtgtggtgtggctgggagtggggagcgtgcacaggtggagagagtggtgtggctgggagtggggagcgtgcacaggtggagagtgtggtgtggctgggagtggggagcgtgcacaggtggggagagtggtgtggctgggagtggggagcgtgcacaggtggagaggtgtggctgggagtggggagcgtgcacaggtggagagagtggtgtggctgggagtggggagcgtgcacaggtggagagagtggtgtggctgggagtggggagcgtgcacaggtggagagtgtggtgtggctgggagtggggagcgtgcacaggtggagagtgtggtgtggctggagtggggagcgtgcacaggtggagagagtggtgtggctgggagtggggagcgtgcacaggtggagagagtggtgtggctgggagtggggagcgtgcacaggtggagagtgtggtgtggacgggagtggggagcgtgcacagtctggcattcttgctggtggacaggggaaagcttgtcctctctgtggcaccaagcaccactaccagtcaggattccttgcctggtaaggcactgcccctgcctttctcctgtctggttctcccaccctcacctgggcaggggttcgctgacccgcccttgctggagggagatgatggtcacctggagatcgtggtgtagccagccaggatcccctcctctcacattgccgctgctggctggaaggcatgggcgctctacagttctggagcccttttcctgccctctctgcccgcagatccagcccttcttcagcagctgcctcaatgactgcctcagacactccgcgactgtttcctgcccagaaatgccagacactccaggtaggggacatgcggctgtcctaggccatactgggagaacaagtggctgaaggcccccagcctgtgctgcgtccttacctggttctgaggggtgattagggaggagagtttagtttaacttggagtccttcaggcctgaagtgtggagtggggctttagagtgtcactccctggggctggactcctggctgtctttcattagctatgtagccttaggcaaattacttaatctttttgattctcaacttccttgactggaaaatgaggtggtttttatcctagagccctagttctgtgccatgcactgagcgcagtgctccaacatgccgtccattttttcatcctcactcattgtgagtcacggtactatgcagtagaggatccccccaccccaaaccccaggttcctggataaggaaactgaggcacagagatgttgaataacttgtccaagatcacacagcagggacgctgttttcaaaagtcgcatgccctaatgcacgggaggctgcagccacgtgctcaccagaaggcaaggcgcaggcatggagccaggctggaaggagaacccagcctcccaaggaggaggcaaggtgtctcttcttagaccagcaactcaagtgtctcttgtagatggtttcattaagttcaacctggatctagagtgcctggtgcagggccaacatcattaaagccctcaagggacgtcagttgtgtttcttgtgatgactgggaagggttaagaatgctattttccctttttcctctgttctcattgcagaaccaattccgggtaagcttggatctctctccgacagcactgcagccctcaggggacattccccagtggccacttgagaagtccctgcctcagccaggcagacaaggctgaaccgaggccagcccggggtggggggtgagaccatggtttgtcgtggtggggccagagaggacagagcctggggctggggagcagggctgggggcctcagggtgggcagggcaggccccgccgcatcactcacgctgttctgctcaccgcagactacatgcccctgtgggtgtactggttcatcacgggcatctccatcctgctggtgggctccgtcatcctgctcatcgtctgcatgacctggaggctagctggtaagcgctggggctctggctgtcctggagtcaggctctaataccagcaccaccactcactaccaaggcaaatcgctttattctcagagcctcagcttcttgcttgagaaccacgtcataaagctgttgtaaggactgagtgaaataagacacatgaattcttagcacagaacctggcatgtgctatttgcacagtatctgttagccacgattatatttgttgttatcaaatgtagtattattaaaatcaatagtttggaaggagccggagtaaagtttccctgtgtcaggaatgatcatccaggcaggtggagcagcctgaacaaccccatcctgcagccgccagacgtggacgcctggggtcagggagaatagtgagggtcagcatcgggtgatagagaaggctccggctgccctgagccacaggggtggaccccagccccacctcattagccttgtagtcacaggccagttacttaatacaccatggattcacttttctgtaaaatgtactgataatgcctccctctaagggtgtgacgaaggttaaatgagtagctgaggaaggtgcttgctggtggggattagtacataccagtgtcttctcccacctgcagccctctgctggccaagtcctaagccgggagaacacaggccttccggttggggcttcagcccttgcctgccccaccatgaccctaggctgctccttccgtcatctgggaagctgtttccacccttccctaggctcgtcaggattaggtgttaatcattattaattattatgtggtagaaagaaaaccagccaggcatgggaggacctatgggaggttccaataacattcagtagcatctcggccagtgctccacaggcggtgcagctctctaaaggtttggggctgggcggcggcggcgcttttggtttcctttctgctgttgcgcttctgttttccgaagtgtcctgcaccacagggtgaaggcaagaggagcctcgctgttatttggctgtcttgtgacagttctggggaagagctgaaagggttaggattgagattaaggttctaagtcgtttgctcagtcatctgtggatctcaatcctcccagctgtcactaaggagttaacccccgcagagcagttttttcatcacatctctgaggggaacaattgcttaagtatgtgggttccccttcctcacctcaaaaataccaggaggaaatgttgcaagcagcctggtggggctgcttctggaaagaagtgtggtaagatgcatgtcttctgtaaagacacttctggggaagagcttttcctcatgtggagtcagtttggggtggccaaatttcagggagacagggcagaccaggaccgtaatgaggaaccagaatggacaccaccccctgccccccggcactgggggtcccagctggatcagtgctacaaaataactgtgatcccaattgattatgtacaacgtgccaggcacgtcacatacacacactcatttaatacccattaaacaagagcaaatacagacccacctcacagaggaagaagctgcatttcagaggcactagtaactgctccaggtcatagtgctcgtagtggcagacccaggactcatgcctgtgcgaccacctagcacggcctcgctgctcagtctcggggctgcccccttacccttcaccctttgtcagggatggggcagacaccctgtgagctggtttctatttctcttcccaaagaaccactccagtgtatttcttttcctttccagggcctggaagtgaaaaatacagtgatgacaccaaatacaccggtcagtatttcctggtttgcatgtttgcttatttttaaagcagtggagggttctcctgggataagtgcgtgggtcgcctcctgtgctctaactcccaagtcccttcaggagaccccaccttagaaacccccttccagtaccccactcagaagggcccccaataacaaggcctgggtgccattttttgaatcactcagacaaggaaagaaaggtaagtattttgtgaacagaggtcctccctggagcagaccaacagagcttggtgcctctttttcttttcttaattaaagtataggctaaagaccagctaggaacgttgagagattctttttcccacaaggcagcagactgatttttttcaggcagccaaaggtggaatagtaacatctgggtttttccaacaggcctcagttgggtttctcagcttagggagggagccaagctctgtgtcctggtccaggcccctcctgggctggcaggcacagagctgccctgggccctggggtgagggtcagcatgtgtggtcttgtttccttagatggcctgcctgcggctgacctgatccccccaccgctgaagcccaggaaggtctggatcatctactcagccgaccaccccctctacgtggacgtggtcctgaaattcgcccagttcctgctcaccgcctgcggcacggaagtggccctggacctgctggaagagcaggccatctcggaggcaggagtcatgacctgggtgggccgtcagaagcaggagatggtggagagcaactctaagatcatcgtcctgtgctcccgcggcacgcgcgccaagtggcaggcgctcctgggccggggggcgcctgtgcggctgcgctgcgaccacggaaagcccgtgggggacctgttcactgcagccatgaacatgatcctcccggacttcaagaggccagcctgcttcggcacctacgtagtctgctacttcagcgaggtcagctgtgacggcgacgtccccgacctgttcggcgcggcgccgcggtacccgctcatggacaggttcgaggaggtgtacttccgcatccaggacctggagatgttccagccgggccgcatgcaccgcgtaggggagctgtcgggggacaactacctgcggagcccgggcggcaggcagctccgcgccgccctggacaggttccgggactggcaggtccgctgtcccgactggttcgaatgtgagaacctctactcagcagatgaccaggatgccccgtccctggacgaagaggtgtttgaggagccactgctgcctccgggaaccggcatcgtgaagcgggcgcccctggtgcgcgagcctggctcccaggcctgcctggccatagacccgctggtcggggaggaaggaggagcagcagtggcaaagctggaacctcacctgcagccccggggtcagccagcgccgcagcccctccacaccctggtgctcgccgcagaggagggggccctggtggccgcggtggagcctgggcccctggctgacggtgccgcagtccggctggcactggcgggggagggcgaggcctgcccgctgctgggcagcccgggcgctgggcgaaatagcgtcctcttcctccccgtggaccccgaggactcgccccttggcagcagcacccccatggcgtctcctgacctccttccagaggacgtgagggagcacctcgaaggcttgatgctctcgctcttcgagcagagtctgagctgccaggcccaggggggctgcagtagacccgccatggtcctcacagacccacacacgccctacgaggaggagcagcggcagtcagtgcagtctgaccagggctacatctccaggagctccccgcagccccccgagggactcacggaaatggaggaagaggaggaagaggagcaggacccagggaagccggccctgccactctctcccgaggacctggagagcctgaggagcctccagcggcagctgcttttccgccagctgcagaagaactcgggctgggacacgatggggtcagagtcagaggggcccagtgcatgagggcggctccccagggaccgcccagatcccagctttgagagaggagtgtgtgtgcacgtattcatctgtgtgtacatgtctgcatgtgtatatgttcgtgtgtgaaatgtaggctttaaaatgtaaatgtctggattttaatcccaggcatccctcctaacttttctttgtgcagcggtctggttatcgtctatccccaggggaatccacacagcccgctcccaggagctaatggtagagcgtccttgaggctccattattcgttcattcagcatttattgtgcacctactatgtggcgggcatttgggataccaagataaattgcatgcggcatggccccagccatgaaggaacttaaccgctagtgccgaggacacgttaaacgaacaggatgggccgggcacggtggctcacgcctgtaatcccagcacactgggaggccgaggcaggtggatcactctgaggtcaggagtttgagccagcctggccaacatggtgaaaccccatctccactaaaaatagaaaaattagccgggcatggtgacacatgcctgtagtcctagctacttgggaggctgaggcaggagaattgcttgaatctgggaggcagaggttgcagtgagccgagattgtgccattgcactgcagcctggatgacagagcgagactctatctcaaaaaaaaaaaaaaaaaaagatggtcacgcgggatgtaaacgctgaatgggccaggtgcagtggctcatgcttgtaatcccagcactttgggaaggcgaggcaggtggattgcttgagctcaggagttcaagaccagcctgggcgacatagtgagacctcatctctacctaaatttttttttagtcagtcatggtggcacatgcctgtagtcccagctactcgggaggctgatgccagatgatcacttgagcccaggaggtagaggctgcagtgagctataatggtaccattgcaatccagcctgggcagcagagtgagaccctgtctcaaaaaaaataaaaaagtagaaagatggagtggaagcctgcccagggttgtgagcatgcacgggaaaggcacccaggtcaggggggatccccgaggagatgcctgagctgaaggattgtggttggggaaagcgtagtcccagcaaggaagcagtttgtgggtaagtgctgggaggtgagtggagtgagcttgtcagggagctgctggtggagcctggaggggaaggagggaggcagtgagagagatcggggtggggggtggggggatgtcgccagagctcaggggtggggacagccttgtgcgcatcagtcctgaggcctggggcacctttcgtctgatgagcctctgcatggagagaggctgagggctaaacacagctggatgtcacctgagttcatttataggaagagagaaatgtcgaggtgaaacgtaaaagcatctggcaggaaggtgagtctgaagccctgcacccgcgttccgactatcagtggggagctgttagcacgtaggattcttcagagcagctgggctggagctcccctgagctcaggaagccccagggtgcaagggcaaggaaatgaggggtggtgggtcagtgaagatctgggcagaccttgtgtggggaaggggtgctgctgtgacttcagggtctgaggtccaaagacagcatttgaaaagaggctctgaagccagtgtttgaagaatttgttcctgaagtacctcctgggggtaggctagaggcttctggcttcagggtcctgaagaacacattgaggtgccgtctgacactggaatagggtgcccttcattcctatgcctgagtccttaactatatttccaacctccagtgaggaggagaagattcggaaatgtgacaggagagcaaacaggacagtttgcatgtgtgtgtgcgcacacatacatgtgcgtgaaagattatcaataaaagtgcataaatttgttgatctggtaagagtttctagcaggaaggtcgagccacttactgtaggtcaagaagttgctagttgcggagttttttcttgcagttagactttacctagtggtagcagggccaccaaagctctgtgtcccagatggtgtatggcccataatccacccaacagcagcaaaggaccaggcaaaggagaacaggagcagaagcctcccagccactagccttttgggctcagtctctccaataatcctggagaggggcttcgttgggtctggacacctaccatgcattctgtgacctttccctagcttccaataaataactgtttgacgcccagagtacaggataccacaatgcactcttcctgcgtagagcacatgttcccatctgctcccattcctcaggaaccttgaattctagctctgctggcctttgagcccatgccagtaaatgtcctgatgggcattgcctactatctccagggcagctgcctttgtcctcctaacagctttattggagtacagttcacttaccatacaatccacaattgaccctgcacaatttgatgccggtttagtatagtcacagttcagcagccatcagcacagtcagtcttagagtttactacccccaaaagaaatccagccccccttagtcaccaccccaacctccccatccctaggcacccctaggctactttgatctctgtagacttgcctcttctggacatgacatagagaaaggagtcataaattctccaaggtgtctgtttcttctttaatgtcattccctgtttctcctcacattccctccccatttcctgggcccagtctcacactggtccttgcttaccctaaatgctattaattccatcactctgagtatggtgtttgctgtccgctgaatgccaagagcttcaagagtgtgtgtaaataaagccacacctttatttttgtattattctgaaccatggctaataaattgtttcaccaagaaatgtctctctaagaacaggtgccctccacgctgtgcccctcccacctcttcagctcgtctcctgagtgtgcagaggtggttccggttgggaaagaagcagcggagcatctaaccatgcctgtgtccaggccgattatgcacgcagccaccaacaagctcccaactcccgcgtagagtttcatgactttttcctgcctactatcttgatcctagttttttttttgttttttttttttttaaggaataattactttgattcaaaaccagtttctcttttctgcataggaaggtccttgaaggtgtttagggtctaaaaagggtggtgttcggtctctgaaacatccattcagcagtttgagctgggatctctgaatgcaagggtatgatggatatacttctttcttgcttttgttgtgttttggttttttgtttgtttttaagtcagggtctctctgtcaccaggctgtattacagtggtgcaatcatggctcactgcagcctcgacctcccaggctcaagccatctttccacctcagcctgccagtggctagaactacaggcgtgcaccactgtgcccggctaatttgtgtgtatatattttgtagaaatggggtttcaccatgttgtccaggctggtcacgaactcctgggctcaagccatctgcccgcctcatcctcccaaagtgctgggattataggcctgagcccaccgtgcctggcctttcctgtttatctttgaaaattaaatagggcataagagagaagaagatgtacttacaatgcagtgggtggttttaactctatagcctttgggctctgtggttggtgctccccttcctaaataaatgaggtgtatgcagggccctcttctgccttagcgccctgccagctgggactccagcaaggcccggggcacctgaggacagagtgagatggagggccgctgctccagcagccgggcctgcatcccacaagtcaactgtgtcggacagaggatccttacaaagaagaggcagcagggttgggggctggccagctgctcgtccgccctaggtagcttgctcatctgtaaagtgggtggggcaggagttcccacctcatggggtcctggcaagcctgcagtatccccgagtggcaccagcctgcttctggggcagagcagtttgtgccccctgaggtaccactgatcctctttccctgctattaggtattgctctcttcctccggtgtttgccttttcagattatagaagtaatatgtgttcccatatttggcgtctctcaggagctcaggaagtacttggctgagtgaacatgtccattgtggaaaaatggcaacaatatggattccatgggtatattttatagaagaatatgaagaaaagcagctacccctaaacccattgcacaagctgttcatgttaattctgtacccgacgctttccccacggggcctcccctcactctgaaatggcatccaggtccatcttgccctccacctctgcatggctctccatgccccatcgcctctcccagatcctagcactgggtccacactctcgccctgtccatttaggttgatgaaagcaggcagtcacccgggtgggccagtcttgcctgtgggaggaacatgcagtctcctgtctcatggtttgaagtgtgccaggaagcctggcccagcccacctccccctggagtccttcccaggaggaataaccccttaggtcattgactataagatgagttcgctcactggatccttcctctctgatgagacaggaagaaggtacacagtgaccaggtaggaggaggagagggagtagaaaggagggatgcgggtggctggtccctgcatttgcctgcttccctgcacgggtgtcccactggccgcctctgctcaccagtgtcatgggattctctcagaagatgaaaacagcccctgcttttttgctagaatggctgagctttcatggaaaggaagctggacccaagcaacagccgactaccgaaggttgcctggagcagtgcagatgtgggaggaagaagggccttggtgcacactggcttttcttcctgactgcaatgtggcattgtgccagctacctcctctttctcggcctcaggaaaatggagagaaagcagccctgaaggtggctgtgacgagggaaggggcagagggcctgacagtcaaccacgcgctatattttcctgttcttccttagggcaagaactgcatggccagactcaggcaaggcctaggtgtgggctgggcattgcctacacgtgaagagatcactccgcgtccctactgcacctgtcacaaagtgccttctgatatgcctggcaaaccaaaatcggtgagcgccagcttgcttccctagaagacatttctaaatattcataacatgcttgctcaaatcaatcaccttattttacatccgctccagggagaaatgaagacatggtcctacgttgttctgtaattattttctatgtaaattttgttccttgttacaattatatatgtcttaggggaaaggaccatttcacatgtgtcacctcatgtgattctcaccacagccctgtgattgctcctgttttataaataatgacatagttccagttgatggccaaagccacagctaacgagaggcagagagagctcaggctcccaggagcttccactctcagaccttgcctcccgggctgccctgagtgaaacgcctgcttagcatttggcacagccagaagcagcaagctagggtcacaacacagagaggggctgtgtaatactggctgcctctgtgctaagaaaaaaaaaaaatcactgtgtgtttgtttattttggtgcaggcccagtgttcttgcttagacttaatactacccttcatgttaaaataaaaccaaacaaaaacccatggccttgttcttcttattcatacgtaagaatttgtgcttctggctggggcaagagtgatagaggagggcacagtatttaaaaattagtttctcaagatgttccccctttggaaagctactcttttagaaagaaatgggaagccgggcgtggtggcacacttctgtagtcccagctacttgggaggctgaggcaggaggattgtttgagcccaggaggttgaggctgcagtgaactatgatggcgccactgcactccagcccaggtgacagagtgagaccctgtctcaaaaacaaagaaaaagaaagaaggaaggaaagaaaagtgagagagagccgagggtgatgagaaaaaatcgttctcaggctgagtccattagagctgagctggctgtgccaacaaagcatgtcaagacactcaccagctccaggccacagcttcactgcctccctgaaaaacatgccaactgcctagaagggccaaggtgtacccataatgttaacacaaacttataaaataatggcgaatgtcacagtgacatttaagaattttgtaaggaaaccaggacagaaaagatcttaaaacaaaccacacaggaagcttgtcacaagtctcaagttttttattttcagaacagagtctggttttatttttaaaaagagaaggaaaaaagtgataaatgctagtgaggtgccacttccctccttcttccaggctctaaccgccagctagctctctttcacaaaacccacggatgcagaatcaggacatgttaaaatggaacagtctttagagagggtctagtctttttaaaataagtaaggatttggggactaacagagaggaagcccctgacttgctgaattgttaggagcaggcggttctcgagattctgagcccaggatccttttctgtgaaccatgcacgtgctggcactggcctcaggagacagtgccctgccttggctgtcaggtccacggagaaatctcaggtttgccccttcactagggatgccctagaaagcaagggcaaaggaagctttaggggtcatcgtgactggggcaggggaagtgagtgcaaggactcaagaaaaacacagcagaggaagggactgaccctctgagcacacagtggttgacccacatgtgtaaaagagggtgactggggctgaactgggggcctgatatctgccagaattggccaagttgccatcagcttcttgacatatccagggaagtggcagctcattggaacttatcacagcctcccaccaaaaacctaacaaacagtacagagattttacagtcagggaggcccagcaggagatggccatccaaacaatagaaggggggcagatcagggggccagccagcggctggccatggctcagacacaatgtcctttcacagtcactgagattaggtagcagagaaacacagcaaagctggagagaggacatgggaacagcgagcagctgttggtacccacccagggcccaggccccagaaccttgagtacaatcaaagggagaggagaggagtcagtgggggcaggggaagaaggcagaaaaaaataccaattaagtgtgaaatccagccagctattgggccacatagggtgagggactggaagcacagattgtgcatggagtgtaaacattttcccccgctgttccctgctctgagagcatgaggaggctcaagagaactctggtcaagccttctgcccctcttatgtctgtctacaagggtgtcttctgctccaagcccccaaaacagttgtaagagggggcttcaagtgggaggcgggggcttggcctgggtgctgagttaacggccagtgacttggcacttctgaccctccctgtgcactctgcagctgtgccaggccctgccccacacccagcccaggcacccaagccctccctccggccttctctgctggggcttcacacacccagtacagagcagggaatgttctgcaagtgcagcctggctggctt

SEQ ID NO: 92 - DNA, 8608 bp, Homo sapiens
ctgggcccgggctggaagccggaagcgagcaaagtggagccgactcgaactccaccgcggaaaagaaagcctcagaacgttcgttcgctgcgtccccagccggggccgagccctccgcgacgccagccgggccatgggggccgcacgcagcccgccgtccgctgtcccggggcccctgctggggctgctcctgctgctcctgggcgtgctggccccgggtggcgcctccctgcgactcctggaccaccgggcgctggtctgctcccagccggggctaaactgcacggtcaagaatagtacctgcctggatgacagctggattcaccctcgaaacctgaccccctcctccccaaaggacctgcagatccagctgcactttgcccacacccaacaaggagacctgttccccgtggctcacatcgaatggacactgcagacagacgccagcatcctgtacctcgagggtgcagagttatctgtcctgcagctgaacaccaatgaacgtttgtgcgtcaggtttgagtttctgtccaaactgaggcatcaccacaggcggtggcgttttaccttcagccactttgtggttgaccctgaccaggaatatgaggtgaccgttcaccacctgcccaagcccatccctgatggggacccaaaccaccagtccaagaatttccttgtgcctgactgtgagcacgccaggatgaaggtaaccacgccatgcatgagctcaggcagcctgtgggaccccaacatcaccgtggagaccctggaggcccaccagctgcgtgtgagcttcaccctgtggaacgaatctacccattaccagatcctgctgaccagttttccgcacatggagaaccacagttgctttgagcacatgcaccacatacctgcgcccagaccagaagagttccaccagcgatccaacgtcacactcactctacgcaaccttaaagggtgctgtcgccaccaagtgcagatccagcccttcttcagcagctgcctcaatgactgcctcagacactccgcgactgtttcctgcccagaaatgccagacactccagaaccaattccggactacatgcccctgtgggtgtactggttcatcacgggcatctccatcctgctggtgggctccgtcatcctgctcatcgtctgcatgacctggaggctagctgggcctggaagtgaaaaatacagtgatgacaccaaatacaccgatggcctgcctgcggctgacctgatccccccaccgctgaagcccaggaaggtctggatcatctactcagccgaccaccccctctacgtggacgtggtcctgaaattcgcccagttcctgctcaccgcctgcggcacggaagtggccctggacctgctggaagagcaggccatctcggaggcaggagtcatgacctgggtgggccgtcagaagcaggagatggtggagagcaactctaagatcatcgtcctgtgctcccgcggcacgcgcgccaagtggcaggcgctcctgggccggggggcgcctgtgcggctgcgctgcgaccacggaaagcccgtgggggacctgttcactgcagccatgaacatgatcctcccggacttcaagaggccagcctgcttcggcacctacgtagtctgctacttcagcgaggtcagctgtgacggcgacgtccccgacctgttcggcgcggcgccgcggtacccgctcatggacaggttcgaggaggtgtacttccgcatccaggacctggagatgttccagccgggccgcatgcaccgcgtaggggagctgtcgggggacaactacctgcggagcccgggcggcaggcagctccgcgccgccctggacaggttccgggactggcaggtccgctgtcccgactggttcgaatgtgagaacctctactcagcagatgaccaggatgccccgtccctggacgaagaggtgtttgaggagccactgctgcctccgggaaccggcatcgtgaagcgggcgcccctggtgcgcgagcctggctcccaggcctgcctggccatagacccgctggtcggggaggaaggaggagcagcagtggcaaagctggaacctcacctgcagccccggggtcagccagcgccgcagcccctccacaccctggtgctcgccgcagaggagggggccctggtggccgcggtggagcctgggcccctggctgacggtgccgcagtccggctggcactggcgggggagggcgaggcctgcccgctgctgggcagcccgggcgctgggcgaaatagcgtcctcttcctccccgtggaccccgaggactcgccccttggcagcagcacccccatggcgtctcctgacctccttccagaggacgtgagggagcacctcgaaggcttgatgctctcgctcttcgagcagagtctgagctgccaggcccaggggggctgcagtagacccgccatggtcctcacagacccacacacgccctacgaggaggagcagcggcagtcagtgcagtctgaccagggctacatctccaggagctccccgcagccccccgagggactcacggaaatggaggaagaggaggaagaggagcaggacccagggaagccggccctgccactctctcccgaggacctggagagcctgaggagcctccagcggcagctgcttttccgccagctgcagaagaactcgggctgggacacgatggggtcagagtcagaggggcccagtgcatgagggcggctccccagggaccgcccagatcccagctttgagagaggagtgtgtgtgcacgtattcatctgtgtgtacatgtctgcatgtgtatatgttcgtgtgtgaaatgtaggctttaaaatgtaaatgtctggattttaatcccaggcatccctcctaacttttctttgtgcagcggtctggttatcgtctatccccaggggaatccacacagcccgctcccaggagctaatggtagagcgtccttgaggctccattattcgttcattcagcatttattgtgcacctactatgtggcgggcatttgggataccaagataaattgcatgcggcatggccccagccatgaaggaacttaaccgctagtgccgaggacacgttaaacgaacaggatgggccgggcacggtggctcacgcctgtaatcccagcacactgggaggccgaggcaggtggatcactctgaggtcaggagtttgagccagcctggccaacatggtgaaaccccatctccactaaaaatagaaaaattagccgggcatggtgacacatgcctgtagtcctagctacttgggaggctgaggcaggagaattgcttgaatctgggaggcagaggttgcagtgagccgagattgtgccattgcactgcagcctggatgacagagcgagactctatctcaaaaaaaaaaaaaaaaaaagatggtcacgcgggatgtaaacgctgaatgggccaggtgcagtggctcatgcttgtaatcccagcactttgggaaggcgaggcaggtggattgcttgagctcaggagttcaagaccagcctgggcgacatagtgagacctcatctctacctaaatttttttttagtcagtcatggtggcacatgcctgtagtcccagctactcgggaggctgatgccagatgatcacttgagcccaggaggtagaggctgcagtgagctataatggtaccattgcaatccagcctgggcagcagagtgagaccctgtctcaaaaaaaataaaaaagtagaaagatggagtggaagcctgcccagggttgtgagcatgcacgggaaaggcacccaggtcaggggggatccccgaggagatgcctgagctgaaggattgtggttggggaaagcgtagtcccagcaaggaagcagtttgtgggtaagtgctgggaggtgagtggagtgagcttgtcagggagctgctggtggagcctggaggggaaggagggaggcagtgagagagatcggggtggggggtggggggatgtcgccagagctcaggggtggggacagccttgtgcgcatcagtcctgaggcctggggcacctttcgtctgatgagcctctgcatggagagaggctgagggctaaacacagctggatgtcacctgagttcatttataggaagagagaaatgtcgaggtgaaacgtaaaagcatctggcaggaaggtgagtctgaagccctgcacccgcgttccgactatcagtggggagctgttagcacgtaggattcttcagagcagctgggctggagctcccctgagctcaggaagccccagggtgcaagggcaaggaaatgaggggtggtgggtcagtgaagatctgggcagaccttgtgtggggaaggggtgctgctgtgacttcagggtctgaggtccaaagacagcatttgaaaagaggctctgaagccagtgtttgaagaatttgttcctgaagtacctcctgggggtaggctagaggcttctggcttcagggtcctgaagaacacattgaggtgccgtctgacactggaatagggtgcccttcattcctatgcctgagtccttaactatatttccaacctccagtgaggaggagaagattcggaaatgtgacaggagagcaaacaggacagtttgcatgtgtgtgtgcgcacacatacatgtgcgtgaaagattatcaataaaagtgcataaatttgttgatctggtaagagtttctagcaggaaggtcgagccacttactgtaggtcaagaagttgctagttgcggagttttttcttgcagttagactttacctagtggtagcagggccaccaaagctctgtgtcccagatggtgtatggcccataatccacccaacagcagcaaaggaccaggcaaaggagaacaggagcagaagcctcccagccactagccttttgggctcagtctctccaataatcctggagaggggcttcgttgggtctggacacctaccatgcattctgtgacctttccctagcttccaataaataactgtttgacgcccagagtacaggataccacaatgcactcttcctgcgtagagcacatgttcccatctgctcccattcctcaggaaccttgaattctagctctgctggcctttgagcccatgccagtaaatgtcctgatgggcattgcctactatctccagggcagctgcctttgtcctcctaacagctttattggagtacagttcacttaccatacaatccacaattgaccctgcacaatttgatgccggtttagtatagtcacagttcagcagccatcagcacagtcagtcttagagtttactacccccaaaagaaatccagccccccttagtcaccaccccaacctccccatccctaggcacccctaggctactttgatctctgtagacttgcctcttctggacatgacatagagaaaggagtcataaattctccaaggtgtctgtttcttctttaatgtcattccctgtttctcctcacattccctccccatttcctgggcccagtctcacactggtccttgcttaccctaaatgctattaattccatcactctgagtatggtgtttgctgtccgctgaatgccaagagcttcaagagtgtgtgtaaataaagccacacctttatttttgtattattctgaaccatggctaataaattgtttcaccaagaaatgtctctctaagaacaggtgccctccacgctgtgcccctcccacctcttcagctcgtctcctgagtgtgcagaggtggttccggttgggaaagaagcagcggagcatctaaccatgcctgtgtccaggccgattatgcacgcagccaccaacaagctcccaactcccgcgtagagtttcatgactttttcctgcctactatcttgatcctagttttttttttgttttttttttttttaaggaataattactttgattcaaaaccagtttctcttttctgcataggaaggtccttgaaggtgtttagggtctaaaaagggtggtgttcggtctctgaaacatccattcagcagtttgagctgggatctctgaatgcaagggtatgatggatatacttctttcttgcttttgttgtgttttggttttttgtttgtttttaagtcagggtctctctgtcaccaggctgtattacagtggtgcaatcatggctcactgcagcctcgacctcccaggctcaagccatctttccacctcagcctgccagtggctagaactacaggcgtgcaccactgtgcccggctaatttgtgtgtatatattttgtagaaatggggtttcaccatgttgtccaggctggtcacgaactcctgggctcaagccatctgcccgcctcatcctcccaaagtgctgggattataggcctgagcccaccgtgcctggcctttcctgtttatctttgaaaattaaatagggcataagagagaagaagatgtacttacaatgcagtgggtggttttaactctatagcctttgggctctgtggttggtgctccccttcctaaataaatgaggtgtatgcagggccctcttctgccttagcgccctgccagctgggactccagcaaggcccggggcacctgaggacagagtgagatggagggccgctgctccagcagccgggcctgcatcccacaagtcaactgtgtcggacagaggatccttacaaagaagaggcagcagggttgggggctggccagctgctcgtccgccctaggtagcttgctcatctgtaaagtgggtggggcaggagttcccacctcatggggtcctggcaagcctgcagtatccccgagtggcaccagcctgcttctggggcagagcagtttgtgccccctgaggtaccactgatcctctttccctgctattaggtattgctctcttcctccggtgtttgccttttcagattatagaagtaatatgtgttcccatatttggcgtctctcaggagctcaggaagtacttggctgagtgaacatgtccattgtggaaaaatggcaacaatatggattccatgggtatattttatagaagaatatgaagaaaagcagctacccctaaacccattgcacaagctgttcatgttaattctgtacccgacgctttccccacggggcctcccctcactctgaaatggcatccaggtccatcttgccctccacctctgcatggctctccatgccccatcgcctctcccagatcctagcactgggtccacactctcgccctgtccatttaggttgatgaaagcaggcagtcacccgggtgggccagtcttgcctgtgggaggaacatgcagtctcctgtctcatggtttgaagtgtgccaggaagcctggcccagcccacctccccctggagtccttcccaggaggaataaccccttaggtcattgactataagatgagttcgctcactggatccttcctctctgatgagacaggaagaaggtacacagtgaccaggtaggaggaggagagggagtagaaaggagggatgcgggtggctggtccctgcatttgcctgcttccctgcacgggtgtcccactggccgcctctgctcaccagtgtcatgggattctctcagaagatgaaaacagcccctgcttttttgctagaatggctgagctttcatggaaaggaagctggacccaagcaacagccgactaccgaaggttgcctggagcagtgcagatgtgggaggaagaagggccttggtgcacactggcttttcttcctgactgcaatgtggcattgtgccagctacctcctctttctcggcctcaggaaaatggagagaaagcagccctgaaggtggctgtgacgagggaaggggcagagggcctgacagtcaaccacgcgctatattttcctgttcttccttagggcaagaactgcatggccagactcaggcaaggcctaggtgtgggctgggcattgcctacacgtgaagagatcactccgcgtccctactgcacctgtcacaaagtgccttctgatatgcctggcaaaccaaaatcggtgagcgccagcttgcttccctagaagacatttctaaatattcataacatgcttgctcaaatcaatcaccttattttacatccgctccagggagaaatgaagacatggtcctacgttgttctgtaattattttctatgtaaattttgttccttgttacaattatatatgtcttaggggaaaggaccatttcacatgtgtcacctcatgtgattctcaccacagccctgtgattgctcctgttttataaataatgacatagttccagttgatggccaaagccacagctaacgagaggcagagagagctcaggctcccaggagcttccactctcagaccttgcctcccgggctgccctgagtgaaacgcctgcttagcatttggcacagccagaagcagcaagctagggtcacaacacagagaggggctgtgtaatactggctgcctctgtgctaagaaaaaaaaaaaatcactgtgtgtttgtttattttggtgcaggcccagtgttcttgcttagacttaatactacccttcatgttaaaataaaaccaaacaaaaacccat

SEQ ID NO: 93 - DNA, 8506 bp, Homo sapiens
ctgggcccgggctggaagccggaagcgagcaaagtggagccgactcgaactccaccgcggaaaagaaagcctcagaacgttcgttcgctgcgtccccagccggggccgagccctccgcgacgccagccgggccatgggggccgcacgcagcccgccgtccgctgtcccggggcccctgctggggctgctcctgctgctcctgggcgtgctggccccgggtggcgcctccctgcgactcctggaccaccgggcgctggtctgctcccagccggggctaaactgcacggtcaagaatagtacctgcctggatgacagctggattcaccctcgaaacctgaccccctcctccccaaaggacctgcagatccagctgcactttgcccacacccaacaaggagacctgttccccgtggctcacatcgaatggacactgcagacagacgccagcatcctgtacctcgagggtgcagagttatctgtcctgcagctgaacaccaatgaacgtttgtgcgtcaggtttgagtttctgtccaaactgaggcatcaccacaggcggtggcgttttaccttcagccactttgtggttgaccctgaccaggaatatgaggtgaccgttcaccacctgcccaagcccatccctgatggggacccaaaccaccagtccaagaatttccttgtgcctgactgtgagcacgccaggatgaaggtaaccacgccatgcatgagctcaggcagcctgtgggaccccaacatcaccgtggagaccctggaggcccaccagctgcgtgtgagcttcaccctgtggaacgaatctacccattaccagatcctgctgaccagttttccgcacatggagaaccacagttgctttgagcacatgcaccacatacctgcgcccagaccagaagagttccaccagcgatccaacgtcacactcactctacgcaaccttaaagggtgctgtcgccaccaagtgcagatccagcccttcttcagcagctgcctcaatgactgcctcagacactccgcgactgtttcctgcccagaaatgccagacactccagaaccaattccggggcctggaagtgaaaaatacagtgatgacaccaaatacaccgatggcctgcctgcggctgacctgatccccccaccgctgaagcccaggaaggtctggatcatctactcagccgaccaccccctctacgtggacgtggtcctgaaattcgcccagttcctgctcaccgcctgcggcacggaagtggccctggacctgctggaagagcaggccatctcggaggcaggagtcatgacctgggtgggccgtcagaagcaggagatggtggagagcaactctaagatcatcgtcctgtgctcccgcggcacgcgcgccaagtggcaggcgctcctgggccggggggcgcctgtgcggctgcgctgcgaccacggaaagcccgtgggggacctgttcactgcagccatgaacatgatcctcccggacttcaagaggccagcctgcttcggcacctacgtagtctgctacttcagcgaggtcagctgtgacggcgacgtccccgacctgttcggcgcggcgccgcggtacccgctcatggacaggttcgaggaggtgtacttccgcatccaggacctggagatgttccagccgggccgcatgcaccgcgtaggggagctgtcgggggacaactacctgcggagcccgggcggcaggcagctccgcgccgccctggacaggttccgggactggcaggtccgctgtcccgactggttcgaatgtgagaacctctactcagcagatgaccaggatgccccgtccctggacgaagaggtgtttgaggagccactgctgcctccgggaaccggcatcgtgaagcgggcgcccctggtgcgcgagcctggctcccaggcctgcctggccatagacccgctggtcggggaggaaggaggagcagcagtggcaaagctggaacctcacctgcagccccggggtcagccagcgccgcagcccctccacaccctggtgctcgccgcagaggagggggccctggtggccgcggtggagcctgggcccctggctgacggtgccgcagtccggctggcactggcgggggagggcgaggcctgcccgctgctgggcagcccgggcgctgggcgaaatagcgtcctcttcctccccgtggaccccgaggactcgccccttggcagcagcacccccatggcgtctcctgacctccttccagaggacgtgagggagcacctcgaaggcttgatgctctcgctcttcgagcagagtctgagctgccaggcccaggggggctgcagtagacccgccatggtcctcacagacccacacacgccctacgaggaggagcagcggcagtcagtgcagtctgaccagggctacatctccaggagctccccgcagccccccgagggactcacggaaatggaggaagaggaggaagaggagcaggacccagggaagccggccctgccactctctcccgaggacctggagagcctgaggagcctccagcggcagctgcttttccgccagctgcagaagaactcgggctgggacacgatggggtcagagtcagaggggcccagtgcatgagggcggctccccagggaccgcccagatcccagctttgagagaggagtgtgtgtgcacgtattcatctgtgtgtacatgtctgcatgtgtatatgttcgtgtgtgaaatgtaggctttaaaatgtaaatgtctggattttaatcccaggcatccctcctaacttttctttgtgcagcggtctggttatcgtctatccccaggggaatccacacagcccgctcccaggagctaatggtagagcgtccttgaggctccattattcgttcattcagcatttattgtgcacctactatgtggcgggcatttgggataccaagataaattgcatgcggcatggccccagccatgaaggaacttaaccgctagtgccgaggacacgttaaacgaacaggatgggccgggcacggtggctcacgcctgtaatcccagcacactgggaggccgaggcaggtggatcactctgaggtcaggagtttgagccagcctggccaacatggtgaaaccccatctccactaaaaatagaaaaattagccgggcatggtgacacatgcctgtagtcctagctacttgggaggctgaggcaggagaattgcttgaatctgggaggcagaggttgcagtgagccgagattgtgccattgcactgcagcctggatgacagagcgagactctatctcaaaaaaaaaaaaaaaaaaagatggtcacgcgggatgtaaacgctgaatgggccaggtgcagtggctcatgcttgtaatcccagcactttgggaaggcgaggcaggtggattgcttgagctcaggagttcaagaccagcctgggcgacatagtgagacctcatctctacctaaatttttttttagtcagtcatggtggcacatgcctgtagtcccagctactcgggaggctgatgccagatgatcacttgagcccaggaggtagaggctgcagtgagctataatggtaccattgcaatccagcctgggcagcagagtgagaccctgtctcaaaaaaaataaaaaagtagaaagatggagtggaagcctgcccagggttgtgagcatgcacgggaaaggcacccaggtcaggggggatccccgaggagatgcctgagctgaaggattgtggttggggaaagcgtagtcccagcaaggaagcagtttgtgggtaagtgctgggaggtgagtggagtgagcttgtcagggagctgctggtggagcctggaggggaaggagggaggcagtgagagagatcggggtggggggtggggggatgtcgccagagctcaggggtggggacagccttgtgcgcatcagtcctgaggcctggggcacctttcgtctgatgagcctctgcatggagagaggctgagggctaaacacagctggatgtcacctgagttcatttataggaagagagaaatgtcgaggtgaaacgtaaaagcatctggcaggaaggtgagtctgaagccctgcacccgcgttccgactatcagtggggagctgttagcacgtaggattcttcagagcagctgggctggagctcccctgagctcaggaagccccagggtgcaagggcaaggaaatgaggggtggtgggtcagtgaagatctgggcagaccttgtgtggggaaggggtgctgctgtgacttcagggtctgaggtccaaagacagcatttgaaaagaggctctgaagccagtgtttgaagaatttgttcctgaagtacctcctgggggtaggctagaggcttctggcttcagggtcctgaagaacacattgaggtgccgtctgacactggaatagggtgcccttcattcctatgcctgagtccttaactatatttccaacctccagtgaggaggagaagattcggaaatgtgacaggagagcaaacaggacagtttgcatgtgtgtgtgcgcacacatacatgtgcgtgaaagattatcaataaaagtgcataaatttgttgatctggtaagagtttctagcaggaaggtcgagccacttactgtaggtcaagaagttgctagttgcggagttttttcttgcagttagactttacctagtggtagcagggccaccaaagctctgtgtcccagatggtgtatggcccataatccacccaacagcagcaaaggaccaggcaaaggagaacaggagcagaagcctcccagccactagccttttgggctcagtctctccaataatcctggagaggggcttcgttgggtctggacacctaccatgcattctgtgacctttccctagcttccaataaataactgtttgacgcccagagtacaggataccacaatgcactcttcctgcgtagagcacatgttcccatctgctcccattcctcaggaaccttgaattctagctctgctggcctttgagcccatgccagtaaatgtcctgatgggcattgcctactatctccagggcagctgcctttgtcctcctaacagctttattggagtacagttcacttaccatacaatccacaattgaccctgcacaatttgatgccggtttagtatagtcacagttcagcagccatcagcacagtcagtcttagagtttactacccccaaaagaaatccagccccccttagtcaccaccccaacctccccatccctaggcacccctaggctactttgatctctgtagacttgcctcttctggacatgacatagagaaaggagtcataaattctccaaggtgtctgtttcttctttaatgtcattccctgtttctcctcacattccctccccatttcctgggcccagtctcacactggtccttgcttaccctaaatgctattaattccatcactctgagtatggtgtttgctgtccgctgaatgccaagagcttcaagagtgtgtgtaaataaagccacacctttatttttgtattattctgaaccatggctaataaattgtttcaccaagaaatgtctctctaagaacaggtgccctccacgctgtgcccctcccacctcttcagctcgtctcctgagtgtgcagaggtggttccggttgggaaagaagcagcggagcatctaaccatgcctgtgtccaggccgattatgcacgcagccaccaacaagctcccaactcccgcgtagagtttcatgactttttcctgcctactatcttgatcctagttttttttttgttttttttttttttaaggaataattactttgattcaaaaccagtttctcttttctgcataggaaggtccttgaaggtgtttagggtctaaaaagggtggtgttcggtctctgaaacatccattcagcagtttgagctgggatctctgaatgcaagggtatgatggatatacttctttcttgcttttgttgtgttttggttttttgtttgtttttaagtcagggtctctctgtcaccaggctgtattacagtggtgcaatcatggctcactgcagcctcgacctcccaggctcaagccatctttccacctcagcctgccagtggctagaactacaggcgtgcaccactgtgcccggctaatttgtgtgtatatattttgtagaaatggggtttcaccatgttgtccaggctggtcacgaactcctgggctcaagccatctgcccgcctcatcctcccaaagtgctgggattataggcctgagcccaccgtgcctggcctttcctgtttatctttgaaaattaaatagggcataagagagaagaagatgtacttacaatgcagtgggtggttttaactctatagcctttgggctctgtggttggtgctccccttcctaaataaatgaggtgtatgcagggccctcttctgccttagcgccctgccagctgggactccagcaaggcccggggcacctgaggacagagtgagatggagggccgctgctccagcagccgggcctgcatcccacaagtcaactgtgtcggacagaggatccttacaaagaagaggcagcagggttgggggctggccagctgctcgtccgccctaggtagcttgctcatctgtaaagtgggtggggcaggagttcccacctcatggggtcctggcaagcctgcagtatccccgagtggcaccagcctgcttctggggcagagcagtttgtgccccctgaggtaccactgatcctctttccctgctattaggtattgctctcttcctccggtgtttgccttttcagattatagaagtaatatgtgttcccatatttggcgtctctcaggagctcaggaagtacttggctgagtgaacatgtccattgtggaaaaatggcaacaatatggattccatgggtatattttatagaagaatatgaagaaaagcagctacccctaaacccattgcacaagctgttcatgttaattctgtacccgacgctttccccacggggcctcccctcactctgaaatggcatccaggtccatcttgccctccacctctgcatggctctccatgccccatcgcctctcccagatcctagcactgggtccacactctcgccctgtccatttaggttgatgaaagcaggcagtcacccgggtgggccagtcttgcctgtgggaggaacatgcagtctcctgtctcatggtttgaagtgtgccaggaagcctggcccagcccacctccccctggagtccttcccaggaggaataaccccttaggtcattgactataagatgagttcgctcactggatccttcctctctgatgagacaggaagaaggtacacagtgaccaggtaggaggaggagagggagtagaaaggagggatgcgggtggctggtccctgcatttgcctgcttccctgcacgggtgtcccactggccgcctctgctcaccagtgtcatgggattctctcagaagatgaaaacagcccctgcttttttgctagaatggctgagctttcatggaaaggaagctggacccaagcaacagccgactaccgaaggttgcctggagcagtgcagatgtgggaggaagaagggccttggtgcacactggcttttcttcctgactgcaatgtggcattgtgccagctacctcctctttctcggcctcaggaaaatggagagaaagcagccctgaaggtggctgtgacgagggaaggggcagagggcctgacagtcaaccacgcgctatattttcctgttcttccttagggcaagaactgcatggccagactcaggcaaggcctaggtgtgggctgggcattgcctacacgtgaagagatcactccgcgtccctactgcacctgtcacaaagtgccttctgatatgcctggcaaaccaaaatcggtgagcgccagcttgcttccctagaagacatttctaaatattcataacatgcttgctcaaatcaatcaccttattttacatccgctccagggagaaatgaagacatggtcctacgttgttctgtaattattttctatgtaaattttgttccttgttacaattatatatgtcttaggggaaaggaccatttcacatgtgtcacctcatgtgattctcaccacagccctgtgattgctcctgttttataaataatgacatagttccagttgatggccaaagccacagctaacgagaggcagagagagctcaggctcccaggagcttccactctcagaccttgcctcccgggctgccctgagtgaaacgcctgcttagcatttggcacagccagaagcagcaagctagggtcacaacacagagaggggctgtgtaatactggctgcctctgtgctaagaaaaaaaaaaaatcactgtgtgtttgtttattttggtgcaggcccagtgttcttgcttagacttaatactacccttcatgttaaaataaaaccaaacaaaaacccat

SEQ ID NO: 94 - protein, 866 aa, Homo sapiens
MGAARSPPSAVPGPLLGLLLLLLGVLAPGGASLRLLDHRALVCSQPGLNCTVKNSTCLDDSWIHPRNLTPSSPKDLQIQLHFAHTQQGDLFPVAHIEWTLQTDASILYLEGAELSVLQLNTNERLCVRFEFLSKLRHHHRRWRFTFSHFVVDPDQEYEVTVHHLPKPIPDGDPNHQSKNFLVPDCEHARMKVTTPCMSSGSLWDPNITVETLEAHQLRVSFTLWNESTHYQILLTSFPHMENHSCFEHMHHIPAPRPEEFHQRSNVTLTLRNLKGCCRHQVQIQPFFSSCLNDCLRHSATVSCPEMPDTPEPIPDYMPLWVYWFITGISILLVGSVILLIVCMTWRLAGPGSEKYSDDTKYTDGLPAADLIPPPLKPRKVWIIYSADHPLYVDVVLKFAQFLLTACGTEVALDLLEEQAISEAGVMTWVGRQKQEMVESNSKIIVLCSRGTRAKWQALLGRGAPVRLRCDHGKPVGDLFTAAMNMILPDFKRPACFGTYVVCYFSEVSCDGDVPDLFGAAPRYPLMDRFEEVYFRIQDLEMFQPGRMHRVGELSGDNYLRSPGGRQLRAALDRFRDWQVRCPDWFECENLYSADDQDAPSLDEEVFEEPLLPPGTGIVKRAPLVREPGSQACLAIDPLVGEEGGAAVAKLEPHLQPRGQPAPQPLHTLVLAAEEGALVAAVEPGPLADGAAVRLALAGEGEACPLLGSPGAGRNSVLFLPVDPEDSPLGSSTPMASPDLLPEDVREHLEGLMLSLFEQSLSCQAQGGCSRPAMVLTDPHTPYEEEQRQSVQSDQGYISRSSPQPPEGLTEMEEEEEEEQDPGKPALPLSPEDLESLRSLQRQLLFRQLQKNSGWDTMGSESEGPSA

SEQ ID NO: 95 - protein, 832 aa, Homo sapiens
MGAARSPPSAVPGPLLGLLLLLLGVLAPGGASLRLLDHRALVCSQPGLNCTVKNSTCLDDSWIHPRNLTPSSPKDLQIQLHFAHTQQGDLFPVAHIEWTLQTDASILYLEGAELSVLQLNTNERLCVRFEFLSKLRHHHRRWRFTFSHFVVDPDQEYEVTVHHLPKPIPDGDPNHQSKNFLVPDCEHARMKVTTPCMSSGSLWDPNITVETLEAHQLRVSFTLWNESTHYQILLTSFPHMENHSCFEHMHHIPAPRPEEFHQRSNVTLTLRNLKGCCRHQVQIQPFFSSCLNDCLRHSATVSCPEMPDTPEPIPGPGSEKYSDDTKYTDGLPAADLIPPPLKPRKVWIIYSADHPLYVDVVLKFAQFLLTACGTEVALDLLEEQAISEAGVMTWVGRQKQEMVESNSKIIVLCSRGTRAKWQALLGRGAPVRLRCDHGKPVGDLFTAAMNMILPDFKRPACFGTYVVCYFSEVSCDGDVPDLFGAAPRYPLMDRFEEVYFRIQDLEMFQPGRMHRVGELSGDNYLRSPGGRQLRAALDRFRDWQVRCPDWFECENLYSADDQDAPSLDEEVFEEPLLPPGTGIVKRAPLVREPGSQACLAIDPLVGEEGGAAVAKLEPHLQPRGQPAPQPLHTLVLAAEEGALVAAVEPGPLADGAAVRLALAGEGEACPLLGSPGAGRNSVLFLPVDPEDSPLGSSTPMASPDLLPEDVREHLEGLMLSLFEQSLSCQAQGGCSRPAMVLTDPHTPYEEEQRQSVQSDQGYISRSSPQPPEGLTEMEEEEEEEQDPGKPALPLSPEDLESLRSLQRQLLFRQLQKNSGWDTMGSESEGPSA

SEQ ID NO: 96 - DNA, 34969 bp, Homo sapiens
cttcccaagccagaaggtaataaatctttttttttttttttcgagacgtggtcttgctgtgtcacccagctggagtgcagtggtgtgatcctggctcactgcagccccaatctcctgcactcaagcaatcctcctacctcagcctcccaagtagctgggactacaggcacacctcaccacaccagctatttttaaaaaattatttttactagagatgaggtcgcactgtgttgcccaggctggtctcgaactcttgggctcaagtgatctttccacttcgggctccctaagtgctgggattacaggcgtgaaccactgggcctggcccagaaggtaattaatcttaatataaaaagtaggcttcagagttatggaattgcggatctgaaaagtccccctatctcaaatatatacatctctaaagccattgtacatagtggcccatcaggccccaaagattaaaagatgttttcgggaatagggccagggtagagcagaaagaagactggacaaagtgtctgagagacatggaaagagcaccggactggctggaaattgagtcatgggtcctacctccatctgtgccctaactacttgtgcaaacctggacaagccaaaagcttgtaggcctgtctccttttacatataaaacaagagcctgcacctctaagatctcttgcatttgtgacattttgtggcctacataacatttggagggagaattctggaaggaaggacaatggtaaaggccagagaagagagaggcagagcaatgcagttgataggctatgtaacttgtatttaaacccatcaaatggaacgatacctaaggttgaaacatttttttttttttttgagatggagttctgttcttgttgcccaggctggagtgcactggcacgatctctgctcacgcaacctccgcctcccaggttcaagccattctcccgcctcagcctcttaagtagctgggattacaggcgtgtgccaccatgcccagctcattttgtatttttagtagagacagggtttctctatgttggtcaggctggtctagaactctcgacttcaggtgatctgcctgcctcagcctcccaaagtgctgggattacaggcgtgagccaccgcacctggccaaaacagattgttaatgatcaccaaggaatatccaaccagaggctgatgcgtgaaatcaggaatgtgctaggaatacaatatgcagaagagcaggcagggagattttcaccaggagggtagaaccccaagaccagggatccaggagcattaatttatttaacagtagttattagggagattcaaggaggcaggctcatgcttaacatgagggaagactgtgatgggtactgaacgttgggtaccgacatgggtaaggatggtccccactttgagagattgtgataccaagctaggattttgtaaccattcatctaactaatatttgttgagcaactaacgagttataggtgctggggataaaaaaatgtctctgcctttctggagcttaagttcctaagtagggtaaataaataaaaatacctagcatgttagtaataaatgttagagacagaaacagcagggaagggcattaggattggacgaaaatgggagcagaaacagcagggaagggcattaggattggacgaaaatgggagcgggttccaaatgtgatctaggctccaaaagaaggcaggaaggagcccagctcaagtctcaagttctcttgttcacctccttcccttctcagcatgaagggaaaacctccctggctcaagctgttgatgcctataatgagtaagacactattccagttatcagaaccagaacaagaggtcagagtccaaccggcagcaagagtagatgatgctggctggactcggtggcttacacaggtaatcccagcactttgggaggccgaggcgggtggatcacctcaggtcaggagttcgagactagcctgaccaacatagtgaaaccccatctctactaaaatacaaaaattagctgggcgtcctagcgggtgcctgtaatctcagctactcgggaggctgaggcaggagaattgcttgaacccaggaggcagaggttccagtgagccaagatcttgccactgcattctagcctgggcgacagagcaagactcccaggcggggtggctcacacctgtaatcctagcactttgggaggcccaggcaggtggatcatctgaggtcaagagttcaagaccagcctggccaacatggtgaaacaccatctctactaaaaatacaaaaattagccagacaaggtggcacgtgcctgtaatcctagctactcgggaggctgaggcaggagaatcacttgaacccgggaggtggaggttgcagtgagccgagatcgcacctttgcattccagcctgggtgacagagcaagactccatgtcaaaaaaaaaaataatatatatatatatatataattggccaggtgtggtggctcacgcctgtaatcccagaactttgggaagccgaggcaggcggatcacctgaggttgggagttcgagaccagcctgaccaacatggagaaacccccgtctctaactaaaaatacaaaattagcttggcgtggtggcacatgcctgtaatcccagctactcgggaggctgaggcaggagaattgcttgaacccgggaggcggaggttgcggtgagccgagatcgtgctattgcactccagcctgggcaaaaagagccaaattctgtctcaaaaaaaaaaaaaaaaaaaaaaagaaagaaatctctctagagaaaatactattaagaacatatgataattaaaataaaaaaattgatgagttaaatatgcaggaaaaaaaccatataagaaaagcagaactcattctcatttcagagtttttatcttgcagaagatcctaaagtttggatacagcaaagtaaaatacagacttttgaaaaacagttaggaattcaagttcatagcaacagcttccctcaagaaaattttcaattgatttgtaatttggcctatgaatttgacctgtggccttcatgtcatgataatttgggtcactctgaatatgccatcccttgaacaagggcctctgctaattttaaatgaatgcagctgcccattcgccattcttctatttgcatcacaatatgtgggaataaatttgcaattaataagacatttccagtaagcagtcagattgaggaaatgaaggacatttagtaagtttaacaagagacatttcatttttgcctttttggacctaaaaaagggaaagaaaacaagtttatgtctttgacaaccttggtagaggcctgaattgtaccctgggctacagcatctaaaaaagccatgtgacctcaaacttgattttagttaaacaaataaaatatatatagaaaagtttgtaccagtcctaaaaatgtcgatcttcctttcctccctccctccctcccttccttcctgtctctttggttcaatgaaaatgaatacttttcaggtttgattcatggagaggtgttacatttgaaattgcctcattgaaacttttggtggtcgagcaccttagggtcttcatttcatcttgcatcggagactgcattaattagtaatatattgtccagatagagggaaacagaggtcctacgtgggtataccaggaaatgaagagtctggaagccctgccctaagagaaacaaataaaggaacttcaaagagaaggaagtgaggtaccctgaggagaagctgggatgtcttaacaactgctttgggattttgagcttgcccttttcactgtgtagagtgttccttgccctactttccacctgttgaagttttcctcattctccaaggtcagactgaatacatctactgtgaaaagtttctagaacctcttgggatccatcttcctactggcaaacccccatagcacttgctacttatgttgtaataccaagcaatagtcagacttatctaggtcaagttaagtaggggcttgaacgccacactaaggggtttaagctttaagcttgtagtcatggggagccactatgcttctgaggacaggtgtgacttacgactgacgtttaggaaggtatcaaaggcagactgagaagctctttcaggtgtgaaagggggtggaattactctctctctgttcttttttgttgtttttgtttttgttagcacatgactatgggctaggcattccgcttggttatcccgcttcatagacgtgagcccggttactccgacacaccgtggccccaggcagcctccccgtcctcaccaccttttcttctgtcatctgagggtaattcctcccctgcagtcgtgctttccgggctcagcaatgacctgctacctgccacgtctagggatctgtcccctcagtcctcacgctcacgctttctgagtccataacctccttcctgaaacgttttcttctcacttctcccaaactgactgcattccccctccggtagtttgaaatttggaagactttttttttttttttttttttttaccgcagacgcttaaaacgaagcttaattagtcaaggacagctatgggtggagacttgaagagatctgaagggtatcttggagcgctttagacttgagaggccggtgacaatagctctaaagagacccgtcaaagcctgcggattcttcttttaacagctctattctcatgcatgcacgccagggctggggggaacttttgttgtttgtttgtaatagaaatcgagaaagggagtggggcccgcctcttttctgacctaagggcaggagtgaggggccgggaggattacgggcggctccccctagacgcgcccccaggcgagctggagactggggcactccttgcttggtagaggggcggggcgcgcctagcggccacgcgcgcgggcgtcggagggggcgtgtctcgcgggcgcgcgcgggcgtcggagggggcgtgtcccgcgggcggtggcggcggcggcggcgcggactgggtgcgcggcgcagcgtcctgtgttggaatgtgcggctgccgcgagctcgcggcgcagcagcggagcgagcgccgccgaggcccggggccccagaccctggcggcggctgccgcagccgagacggcagggcgaggcccggaggcctgagcaccctctgcagccccactcctgggccttcttggtccacgacggccccagcacccaactttaccaccctcccccacctctcccccgaaactccagcaacaaagaaaagtagtcggagaaggagcggcgactcagggtcgcccgcccctcctcaccgaggaaggccggtaagtggggcgctgggctgggggctcggtcagggtgggggagggccgcccgggcggcggcagtggcgggacggggagggcgcggaaggacgcggagtcaggcgctgtccagggctgatttgcagatactgtggctccggcggcggcggccccgccgggcgggggctggcggccgagcaggatcgggttacacagcagccgcccgggggctgggggcgtttgttgggagcagcgcgtcgcctggaccccctccccactggaggctgggacgccgcctccgcgctggcccggacgctccaccgagtcaggtcctttgaggccaaggagcggagctgctcgggcccgtagtcctgaaacttcctctgcttcctcctcctgcccccgggtcccaccgcagccccgcgccggcccgcggccctcctggccccctcccccagggcctctccctgtcgccggaaggcgccgttgagtgcggccgggcgggttgagtcagccccggggcccgggcggttccgcctgcggggctggacagcgatttctgcgcttcagccgtccggcgccgctggcccccgcgtccggccacccgaccgctggagctggcggggctggggcgcgcgtcctgccgggcgccgtgggggagtgaagttcgcaaacttccggggcgcgggggtggcggctggcccgtgtgggggccccctccggcgctcggagcccgacgcctcgcgagggcgcccgcggagcctccccggccctgggcgttgggcgagccccggggcggtcggaggggcccgggggcggtcggagaagcccggacgccggctgcgcggtaactttccgtcctctcccgggacgggggccctagggctggggagggggctgcctggactcggggaggactggttccggccaaacagcgcctcgagcttgatcccctcccccgttttagtgttggagagcgcaggaaaaggctcaggacgagtgtcggggcgactcccgcgagttggtgtgtaaatgtgtgcagtgagcgggccgaggcgagaggaagcgagagcgcccgagtttgcaaagagctgctttgtgtttggtattttgagaaaatggccgaatgcctatttcagttaggaatgccgccgccgaggcaggcgctggtggcagcagcacggaggaattcgtgcagcacgttgggctttcgggctgtgcctggacggtcttcctaacaatcgttaaaattccatttggggtggcagttaggggttagggagcaattagaaaagtcgatgttgggccaaattacccaatagcttgggctgttcagccccgggacagccttcgccctctgttttctgtgatggcatttgcttccaacttttgttggtacgtagaactaaaccggtttgtgtttatacacttgggtgaagcgggttactttttgtattttcggtttaactttattttcttagaacttcttactttttttaatttgcgagtgaacacttcgtttgagaatggcaccttttagattgagaagtaacgtagcatctagaaagcccaacttgttttgaagaaggtgatcttgtaatggcttccactaggcaagtaggccaagtcaagcacaatgcaagaaagttgctgattgtcgagttgagttgcacgatgattttattcgtattgaaaagcttggaattcagtgttgtggaacttcagcctgcagaaaaataagcttattaatttttatttgtgaagttttgaataaatcaaacttcctttttcacaagaaaaggggtccataaatgttttttcttttaagcctgtggagttgtcgaaaaattaaggggctgactgctactttttcacagtagtttattcttttggagttagttgagttcatgcgaaatccaattaagttgaacaattattacaggcttgtactttccagatgtgtttgtgtacttaataaatgcactgaatggcttgtggatttctgggctttctgattcagaccattgaactgttgaaggggggaaaagttgggaggacaataatttactactcatgttttgaatttttaaaataattttaacagtaaaaatgaaggttactttttatccccaccagaacaattaaaagtgcttgaggaggcaccacatgccagtggctgaatgatgaatgagttgtgcaaacaattggtagaattgttttatagggatagtagaaatttttttttggtgattgcagtagactattgggaattaacaactattttaaagatttgtttttaataggcgatgaagtttactgagttataaagatcatactggaaaatttttaagttatgaagaattacagcgatgtggttttaagccagtaacagtagtgtttaaactggtgctcttgttttgttttgtttttaattcagaatacagttatggccacccaggtaatggggcagtcttctggaggaggagggctgtttaccagcagtggcaacattggaatggccctgcctaacgacatgtatgacttgcatgacctttccaaagctgaactggccgcacctcagcttattatgctggcaaatgtggccttaactggggaagtaaatggcagctgctgtgattacctggtcggtgaagaaagacagatggcagaactgatgccggttggggataacaacttttcagatagtgaagaaggagaaggacttgaagagtctgctgatataaaaggtgaacctcatggactggaaaacatggaactgagaagtttggaactcagcgtcgtagaacctcagcctgtatttgaggcatcaggtgctccagatatttacagttcaaataaagatcttccccctgaaacacctggagcggaggacaaaggcaagagctcgaagaccaaaccctttcgctgtaagccatgccaatatgaagcagaatctgaagaacagtttgtgcatcacatcagagttcacagtgctaagaaattttttgtggaagagagtgcagagaagcaggcaaaagccagggaatctggctcttccactgcagaagagggagatttctccaagggccccattcgctgtgaccgctgcggctacaatactaatcgatatgatcactatacagcacacctgaaacaccacaccagagctggggataatgagcgagtctacaagtgtatcatttgcacatacacaacagtgagcgagtatcactggaggaaacatttaagaaaccattttccaaggaaagtatacacatgtggaaaatgcaactatttttcagacagaaaaaacaattatgttcagcatgttagaactcatacaggtaagagaagctttctagtccataagttcagttctcttttctgattgttacttgagtggttagttaagtagtgcttgagaaaaaggactctggttcaaatccaggttccattttgctatctttgtgaccttgcacaagttgtttaacctctttgttcagaaatttctccatggagtaacaatatctaggttgggaggattatgtgaagttacatgtaaagcacagaggaacagccaagagatcttaccgtggtcttactaaagtacatatcctaacttggggtttaccttcagcaagttagactggccgtgcatggtggctcacgcctgtaatcccagcacctcgggaggccgaggcgtaaggactgcctgagcccagaagttctagaccagtctgggaaacgtggaaagacccccgtctcaaaaagaaaacagaaaaaaaaaagtttgtgtatttatttctgtgacagtgaacacatttaagatgcagtgtagtttctgaaagaaattgagggcttatataaaaaggaaaactcagtgattaaccttgcacatgcccacttaacaaaagcctcaaactttaaaacatttgacttatagcattgagttcctaaatggaacaacttgtctttgtccacaaaaaagaaatgtgagaaggtagtttttaaaaggtgggtgggattatcaccaattgaaactattttcctatgaaagcaaacacttgtagaaaatgtatttttcagacaattatgtttagggtgtttgaactgatactaagcgcaactgtataaaaaaagttgaaactttttttttttttttttttttgagacagtctggctttgtcgcccaggctggagtgcagtggcaagatctcagctcagtgtaacctctgcctcagggttcaagtgattatcttgcttcagcctccctggctcagcctcccgagtagctgggattacaggcacccaccaccgtgcctggctaattttttttttttgagacggagtctggctctgttgtcgaggctggagtgcagtggcatggtcttggctcactgcaacctctgtctcccaggttcaagcagttctcctgcctcagcctcctgagtggctgggactataggtgcccaccaccacacccagctgattttgtatttttagtagagatggggtttcaccatgttgcccaggctggtcttgaactcctgacctcgtgatccgcccacctcagcctcccagaatgctgggattacaggcgtgagtgccacccctggctaatttttgtatttttagtagagatggggttttgccatattggccaggctggtctcaaactcctgacctcaggtgatctacccactttggcctcctaaattgctgggattataggggtgggctaccgcacccagccgaaactttttttttttttttaatttctttttgtggagatggggggtctcactatgttgcccaggctggtcttgaacacctggcctcaagtgatcctcctgccacagtcttcccaagtgttgggattataggcgtgagccactgtgcatactagtcattcacttttaaattgggttttattcagctgctgttcactgtagtttttttaattggatttatttattcatttattgatttatttgagatggagtctcaccctggagcccaggcagtggtgtgatcacagctcaccacagcctctacctcctgggttcaggcagtcctcccatctcaacctccaaagtaactgggactacagatgtgccctaccacaccctaattttttaaaatttaaattgggttttaaatattgtaattgaggggcctcatttttcaaataaatgtttttaactattggtagctcatttggacatttctgttacattttcttggtaagaattggtacatttgggtcctgatgaatggatagagaataatccagtactctactcttggggtcacaaatgaatagggggtgtgggatgctgtttgcctcaggtctcctcttacaggagttggcacttgacaggactgaaccccactggtaaaggggacactgaggaggggaattgatgctgctttaagtggagtggtagacttaatttttgttttgttttgttttggagataggatctccctctgtgccccaggctggagtgcagtgacgcgatctcggctcactacaacctccacctcccaggttcaagcgattctcatgcctcagcctccccagtagctgggattataggtgcccaccaccatggctagctaattttttgtttttttagtagagatggggtttcactatgttggccaggctagtctcgaactcctgacctcgtgatctgcctcggcctcccaaagtgctgggattacaggcgtgagccaccgcgcctggccagttttttttttgagatagttttactttgtcacccatcctggagtgcagtggcgagatcactgctcactgcagccttgacctcctggacttgtgaccctctcgcctcagtcccccaggtagctgggaccacagacgcatgccaccacacctggctgatatttgtatggtagagacagggtttcgccatgttgcccagattggtctgtaactcctgagctcaagtaatctgcccttagcctcccaaagtgctgggattatgggtgtgagccaccgtatccagcgacttaatttttaaaaatttattttatttacttattttttatatcccagatacttaaaactattaactggcaggcttaaacaataaaacttgcaggtgaaattccattacaagagtgacctctgttacaggattgctaagccccagcagatggatggctcatgtgttgaatgctttaaaatttagtccagtaaaagaatttgtagtccctttggaatttgtcataagctgtgattgattgtctcgatgctttgaaaccattcgatttcagaagtaaaggtcaagcattacaaaaatacataaagtaggaaatgaaagttacttggggacacaaccccattaatcacttgacagtttgaattagacagactgttagactaaaccagccttacctacaatatcttaaatcccagccatcatatatactaaactcataaataagtacaccatattcatttagctgggattacaggtgccttccaccatgcccggctaatttttgtattttcagtagagatgtggtttcaccgtgttggccaggctagtcttgaactcctgacctcaggtcgtctgcccacctcagcctcctgaagtgctgggattacaggcctgagccaccaagcctggcctggtttatttggtcttaatgcttatttttccccagtattaccttcattctgattttttttttttttaactttttttttttttttttttttgagacagttttactcttgtcgcccagggtggagtgcaatggtgcaatctcggctcactgcaacctccgcctcccaggtacaagcaattatcctgcctcagcctcctgagtagctgggattccaggcatgcgccaccacacctgctaattttgtatttttagtagagacaaggtttctccatgttgggcaggctggtctcgaactcccggcctcaagtgatccacccgccgcggcctcccaaagattacaggcgtgagccaccacgcctggccaattttgtgtgtgtgtgtgtgtgtatttttttttttttttttttttttgagatggagtcttgctctgttgctcaggctggagtgcaatggcgtgatctctgttcactgcaacctctgcctccagggcttaagtgattctcctgcctcagcctcccgaggagctgggattacaggtgcgtgccaccacgcccagctaattttttaaaaaatttttagtagagacagcgtttcaccatgttggccaggctggtctcgacctcctgaccttgtgatcagctgacctcggcctctcaaggtgctggaattacaagcgtgagccaccaaacctggcctttattacattttaaaacaatttggtgatgtatagattgaaggttaatattttgattatgtaaattctgaaagtatctctggtattaaatggatagttctgaaaattatggaaaataaactcatctggtgcggaagagtagagacagaaaagacaggaatcacttaaattgatagtgttcaggaattacttctcatttccacttgcattagtaagtagcccagttttctgattggcttagtgggcttaattgtgtttcttgtgcccttctattctgtgctaatcttcagaacaatccattgaggaaaatagcatctgtgatgatagttcatgtttacacaggggaaaacttcagatttaaaaggctgaagtgatgttcccaaggtcatatacaagtatcatttatagccgttccacgatggctcacgcctgtaatcctagcactttgggaggatgaggcaggagaatcgcttgaacctgggaggtggaggttgcagtgagtcgagattgtgcaactgcactccagcctgggggacagagtgagactctgtctcaaaaacaaactacaagtagcatttaaagttcagcaatctcgactcactgcaacctccaccaaaagggtggggggagctggggactttcattctggttgacctctttagtttagtggttttgatatttaacttgttcacaaaatctacttttaaagaaaacctttttgcctgtatgtgtaactgaaaaatcagtaggtaactaagctttctggaggagagttatgcctagtttgtggaattacacagataaagtaatctgttgtaaagaatttaaaagcaggctgggcgagatggctcatgcctgtaatcccagcaccttgggaggcaggcagatcacctgaggttgggagtttgagaccagcctggtcagcatggtgaaaccctgtctctactaaaaatacaacacttagcctgtagtcccagcttctcgggaggctgaggcaggagaatcacttgaacccaagaggcagaggttgcagtgagccaaaatcgcgccactgcactccagcctgggcgacagagcgagactgcgtctcaaaaaaaaataataataaaataaaagaatttaaaagtaaattatctttgattcttcaagtttatctgcagtggtatttaattttttattgagatacagtttacatatgcagttcactatatattggcctgttctgaatatttcacacaagtggaatcataataagcagtctgaataatgctgctatgaatattcatgtttaagttttgtgtggacgtatgtttttgtttcttttggatatatacctaagcgtgagattgtggggcagtatagtagcaacattttgggtaattgccaaactgttttccaaattagccatgccattttacaatcccaccagcaatgtgtgagggttccaatttcagcacatccttagcaataatactgttaacatctgtctttgtgattacagctatcttagtggatatgaagtcttcatctccttgtggttttgatttgcatttccctcactgctaatgataatgttcatcttttcatgtgtttattggctatttgtaaatcttttttttacagaattccattaacataaaactatcttaattgttccaggtcataaggtaggcattctgttgctaccaactctttacagctaattcgtagctaccagcgaattacagcagaatagttatgaggaacacatttcccatctatcaccattctttttgttgttgtttgttttttgttttaagacagggtctcgctctgttgccctgtgtggagtgcagtggtgtggtcacggctcactgaagcctcggccttctgggctcaaatgatccgcctacctcccaaagtgctgggattacaggcatgagccaccatgcctggcctgttcttttttctgtgtaccaccttttccttattttattagacacatttgtttctgtcttagacaaaattgatagcttacatttattgagggctttactatgtgccagacacagtgttaaatgctctgcatgtattatttaagcttttgcaattacaggaaatgaagattctgttacttttacagatggggaaacggtgttttagtagctttaccaaggtcataattatcttgtgtttggagactatattaaaacaaattgtatacctttttttaaaagcttgttttgccgggtgtggcggctcatgcctgtaatcccagcactttgggaggccgaggtgagtggatcacgaggtcaggagatcgagaccatcctggctaacaaggtgaaaccccgtctctgctaaaaataccaaaaaattagccgggcatggtggcgggcgcctgtagtcccagctactcaggaggctgaggcaggagaatggtgtgaacccaggaggcatagcttgcagtgagccgagatctcaccagtgcactccagcatgggcaacagagtgagactccgtctcaaaaaaaaaaaaaaaaaggcttgttttgttgttgacagccatgtctaaaaagaatatacgtttcctacctttgagtcttaaattcttcagtattaaatcactggcctctagtcttcagtccctgtggcttttataatttgttttaaaaattgatgactggttgggcatggtggctcatgcccgtaatcccagcactttgggaggccaatataggcggattgcttgagcccagaagttcgagaccagtctgggcaacatggcaaaacctggtctctacccaaaaaaaaaaaaaattagctgggcttggtggcacacgcctatggtcccagctacttaggaggctgaagtgggaggatctgttgagcccgggaggtccaggctgcagaagctacgttcatgccaccacactccagtctgggcaacagagcgagaccctgtctcataaaaaacaataaaaagaaaattgatgaccttctcttaaatttttctttttagcttaatgttttttatttatttttatttttagagacaggctctctctctgtactccaggctggagtatagtggtgccgtcatagctcattgcagcctcaaactctgggctcaagtgatcctcccgcgtcagcctcccaagtgagactacagggtctcactttcacccaggctggagcacggtggtacaatcatggctcacaccagcctcatccttcttgggctcaagcaatcctcccatctcagcctcccaagtagctgggaccacaggcatgcgccaccacgcctggctaatttttctgttttttgtagagaggaggtcttgctatgttgcccaggctagtcttgaactcctgggctcaaatgattggcctgtcttggcctcccaaagtgttggggttacagtcaggggccacaatccccatgctcagcccaggctattttttttttttttttaaacgagatgaagtctcactcagcctcccgagtagctgggacaacaggcacgtaccaccatgcccggctaattttttttgtatttttagcagagatggggtttaattatgttggccaggctggtcttgaactccttacctcgtgatctaccagcctcagcctcccaaagtgctgggatttcaggcgtgggccaccgtgcccagccccaggctagtttttaaaataaaattttagaaatgaggtattgctgtgttgcccaggctggtctggaactctaccacttgaaaatttttagcataaagcaattacattctcactcagaagtattgttttaagctaacactttcaaatggtagtagattcatcatttacaagttaaaaaaaaaacctaaaaaccggtgttaatagcatcagacagttcaggtagattttttaaaaggtgattcttaatataacaaaaatgctttgtaccttatcaagatagttttttacttatcactacttaatgtattaacatgcagtatcactgtgaaaattaaaagggctgtgagaattcggaaagtcaatgttgttttcttgtcagcaaagccaaaataatgtagtcatagtttctgaaataaataacttacattttaagtacatgataaattgatctttttgccagaaataggaaaaaaaaattcttgttaaaatgtgctgagcgctgaacattgttgcattgttagtgagaattgtatttggctatttcgtgacatttaaacactcttatattattgaaattttgcaggagaacgcccatataaatgtgaactttgtccttactcaagttctcagaagactcatctaactagacatatgcgtactcattcaggttggtaagaaattggaacttttctatcattttcagtaaatgaccattttaaggaaattcttttagacttgtaaccgagtcatttacttattatttatttttaatataatttagaagtcagaatttaaaaatcagtattccgtcaatctggggattcctaacatggaatccaaaggtggacctcctgaaaatggaatttttgtgtacactttttctgggaggaggggccttaattctcatcaaatctttgaagcgttccgtgactccaacaaaagttaaactaatgtagaccaagactgattgatcttttaacccctacttctcatatttctcctaacagtataaagctgagagtcacaacgtgtggttgacaagtgtcagggattccttcttagcttctcaggtcctgaaatgaaggtttgttctgtttcaaggtttggtcgagcttttgaggactgactgcaaaagtttagcttgaaaaagaaaatgatagacaatctaggatgccaatttattaagctgtattaagagtataggactgtaacatgagagattcgtccactccagtgactgaaacaatcaccatcaccactcataattagtccctgttggccagcatggtggctcacgcccttaatcccagcactttgggaggccaaggtgggcggatcacctgaggcggggtagtttgagactagcctgaccaacatggagaaatcctgtctctactaaaaatacaaaattagccaggcgtggtggcgcatgcctgtaatcccagctgctcagtaggctgaggcaagagaattgcttgaactttaggaggcagaggttgtaagccgagatcacgccatcaagagcgaaactctatcttgaaaaaaaagtccctattgtcaaagtattcaagtggccaagttaaaaagtaatgttagcattggtggtcttgcttgaatgggtagccctgattgactcttggtgaactaccacttttactttttatttttatattttttttggagacggagtcttgctctgtcgtctaggctggagtgcagtagtgcgatctcagctcaccgcaacctccgcttcccaggttcaagcgattctcctgcctcagcctcctgaatagctgggattacaggcgcgcaccaccatgcccggctgattcttgtatttttagtagagatggggtttcaccatgttggtcaggctggtctcgaactcctgacctcatgatccacccactttggcctcccaaagtactgggattacagtcatgagccaccatgcctggccgaactaccacttctaattagaatacagatttagaatgtatatccctgtgggaaaagtatcttaaatcttgctgttacaaaagcctatgtagaaccatctcccttaagttaataattagcttagatctgtgctattcgcttgagtagccactagccacatgtggctattaagctttcgaaacattagtagtttgaattgatacttataaaatatgtacttaccagattttttaaattttattttattattattttttttctgttgagacagagtcttgctgtatcccccaggctggagtgcagtggcgcgcatctcagctcactgcaacctctgcctccggggttcaagcaattctcatgcctcagcctccccagtagctgggattacaggcatgtgccaccatacccagctaatttttgtaattttagtagagatggggtttcgccatgttggtcagcttggtctcgaactcctggcctaaagtggtctgcgcatcttggcctcccaaagtgctgggattacaggtgtgagccaccgcgcccggccacagatttcaaacaatgtgaagaaaagactatctttctctgaagcaggttagagaaaaaataaaagaatgttaaatatttatttttcaagttgatcatatggcaaaattattgtatacattggctttaaaaagtaataaaattaattttaactgtttcctttttacctttgtggtatgactactagaaaatttaagattacatgtgtgatatgcattatatttctactggacattgctgccatgagttagtaacaagacttgataataagacttgattatgtcacagattctgatttatttgaacagctatgaaggtgtcctgtagtatagttgctagcctttcttgaccctacgtgcttgtcacgctaatgtactttgagtgtttttttcctaaatctaagccattgagtggtgccacttaaccagaaacctggttttattatttttgggtgttttttggtttcattctctgatggtaatgtggatgcaatttcagactttggaggtaagcatcatgtcctgttgatagttgtactagctttttagtaaaatatttgagagctttgtattattattattattattattattattattattattactttttttttttttctgagatggagtttcgctcttgttgcccaggctggaataaaatggtgtgatcgcagctcactgcaacctccgtctcccaggttcaagcgattctcctgcctcaacctcccaagtagctgggattacaggcatgtgccaccacacccagctaattttgtatttttagtagagatgaggtttcaccatgttgaccagcctggtctcgaactcctgatgtcaggtgatccgcctgcctcagcctcccaacgtgctgggattacaggcgtgagccactgctcccggccaagagctttatattagttaactagtttttgtcttcataaatattttatgttgcatgagttctattatccccattttacagttggggaatgtagggcattgaaaaaaatacgaccttttttcctgtagaatgtccttccttctggatatgtccacttgttttctcatggtgtcatttagcttttcttctgtcctttgtattgtaaactggaaattaaatttaaatgcttgataatctttctcgcaaatgatatgcctcatttaaagtcacgtggttgacccattaatataatgttaggtcactgcatttagaatgactacatacttttatcctttcgttcaattagtaatactttgtcttgtcactgtttaaatgtttatggtgttttacaccagttgataatctttgactgaaacagttgtatttgggtttgcaaaatgttttgagttttgcctgctgtattttaaagatgatttttagtatttgctgttacagtatagcaagtattttaatggtgtcttaaaaactagtagtagccactagctattgtatgtatgctgaatagtaaaaacaagtatttgctgtctccagtcttagtactacgaagatactgagtttcagattacatattataggatacaagctcacaaataagtaattttgttgttgttgtttttggagttggggactctgctgcgcaggctggaatgcagtgatgcgatcatgcctcactgcaacttcatatgcctaggctcaagccatcctcttgcctcagtctcctgagtcgctaggtctactggcacatgccaccactccagctaattggggactattattattattattatttttgagacagtttcgctcttgtcacccagctagagtacaatggtgcgatctcggctcactgcaacttctacctcccgggttcaagctatagaatcttcctcagcctcctgtgtagctgaaattacaggcacccgccaccatgcctggctgatttttgtatttttagtagaggtgttgatccacccacctcagcctcccaaagtgctggaattacaggcatgagtcaccgcgcctggctggaactattatttttatttaaatatcgtatttatttatttattgagactgagtcttgctgtcgcccaggctggagtgcaatggtgcgacctcggctcactgcaacctccacctcctaggttcaagcgattctcctgcctcagcctccctagtatctgggactacaggctcgtgccaccatgccaggctaattttttgtatttttagtagagacggggtttcaccatgttagccaggatagtcttgatctcctgacctcatgatctgcccgcctcagcctcccaaagtgctgggattacaggcgtgagccaccacacccggccaatatcctatttctttctatggagactgggtcttgctgtgttgcccaggctggcctcaaactcctggcctcaagcagttctcttgtctcagcctcccaaagtgttgggattacaggtttgagtcactgtgcccagacagacatgttttatttttttctgttgataacgttggtgccaagggacttttaaatagctgggattgtttgaaagatattgtgatggcttgagagtctttgtagaataaattttaaaaactattttattgagatataatttataaatttaaaaatgcacaggtcttgagtgtacagctcagtgactatgctttcacctatttgattatcactcaagaacaagagatggaatatttctgctcagaaacaccttgccctttccacccagtctttcccctggatgatattctgtctcctaccaaagaacattatagaatttgtttgtttgaggtgggatctcactctgtcactcagggtggagtgcagtgggtgcagttacagctgtctaaacctcttgggctcaggcagtcctgccaccttaacctcccaagtagctgggaccacaggtgtgcgctaccatgcctgttttttttttttctttcttttttgtagagatggagtcttactatgttggcccaggctggttttgaactcctgggctcaagcgatccacttgcctcaccctaccaaagtgctaggagtacaggcatgagccactgcacctagttttagaacattcttttataaaatgttcttgagatttatccatgttgcgttattggacttcattttattgctggtaatgtattgtatgccgccattactttttacttaaaaattttctttgccggctatgcacggttgttcacacctgtaatcctagcgctttgggaaaccatggtgagcggatcatcggaggtcagaagttcaagaccaggctggccaacatggtggtaccccatctctgctaaaatacaaaaattagcctggcatgatggcgggtgcctgtaatcccagctactccggaggctgagacaggagaatcacttgaacccgggagacggtggttgcagtgagccgagattgcgccattgcactccagcctgggcagctgagcgagactcagtctcaaaaaaaaaaaaaaaaaaaatttctttgccattctctcttggtttttgttttgttttgtttttatttttaagggaattaatttaaaaacttaaattgagaggcttgtatttgtgtatttttcactgcggctttaacctcctaggctcaaacgatcctcccacctcagcctctggagtaggtggcactgtaggcttgtgctataacatgtggctaatttaaaaatttttttgtacacagggtctcactaggttgcccagactggtctcaacctccttagctcaagcaatcttcctcacctcatcctcccaaaagtgctaggattacgggtgtgaaccactatgcctggccattcttctaagaatatttttgatacgtatgtgtaaagcttgcagaactctttccccttttgtcttggcttacacctataaattcatttcggaggcataaaacagacaattggtagatttataaagaagagaacctgttactagaattgggaaaaagaatttaaaattgtttgtacagggcaaaagttaatattcaggtaggtactaattagaaaatcttgatgaatatattttaatataagcaagacttcatggcaataaagtaaaaattacgggagaaaaagaacggagcaaataaatcatgccatcaaattttaaacagaaaatttctacatcctccctttccgttcaccattccttaggtggaccctcgcaccttgatggatgcatgcttgctctatagatctccttattcatcagagttataaaatggtgctattttaattatagttattttattagtgtgtaaatatgaagagaagagataaattccacttatctatttactcatgatgtaggaaagacaggatacgtaagagtcttccccttgattgatcgattgattgagatggagtctcaccctgtcgtccaggctggagtgcaatggcacgatttcagctcactgtaacctccgcctcctgggttcaagtgattctcctgcctcagcctcccgagtagctgggattacaggcatgcaccaccacgcctggctaagtttttgtatctttagtagagatggggtttcaccatattggccagactggtctccggctcctggtctccaactcctgacctcttgattcgcctgcctcggcttcccaaagtgctgggattacaggcgtgagccactgcgcccagccttttttatttatttatttttttgagatggagtcttgctctgttgcccaggctggagtgcagtagtgcgatctcggctcactgcaccctctgcctcccgggttcaagggattctcctgcctcagcctcccaagtagctgggactgtaggcacgcatcaccacgcctagctaatttttttgtatttttacaaaatgcctccccaaattttatatttttacaaaaatgcctcccaaagttttgggactacaggcgtgacccaccgcgccctgctgagtcttcccttttatttatccatactcaaagttaccaattggttccaaaagtgaacaattataggtaacacattttgagttcttgctgtctgctccatgttaaggactttacatagattagattatttatagctcacaacacttagagagtattttatagatgaaattgaggccgggcgcggtggctcacgcctgtaatcccagcactttgggaggccgaggagggtggatcacctgagatcaggagttcgagaccagcctgatcaacatggagaaatgccgtctctactaaaaatacaaaattagccaggcttagtggcacatgcctgtaatcccagctactagggaaggtgaggcaggagaatcgcttgaacctgggaggcgggggttgcagtgagccgagatcgcgccattgcactccagactgggcaacaagagtgaaactccatctcaagaaaaaaaaaaaagaaagaaattgaactctagagaggtttcaggactttgctcaaagtctcagagtgagcaacttgcagagctcatgttttatctcccagatggtctagctctatctagaagttcttaggccttatgctacctatctttctacattctatgtccacgtatgttaaaatgtttgtctccatttaaatcattcactggagagaaccaggtatagagtaatgtagcatgttgtagaaacttgcatatttgtaaatctgttagtagaccaacatggagaagaattgtccagtcagctgaatatctaatttgactacctggataaggtgattattttatcaccaggcattttctaatcatgtaaaacttaacatctacatggttttacctaatgtctgagttttgctttatgaaaatttttagtacaatttgatatgaatttgagaatgtttgagatgaattttcataaatgtcaatttccgtttttctactatgcattccattggaccagtggggtatggataccatttggtaatatttactagagtgtgatctagatgggtatgtattcaggtagaatgtattactcttatgcctttaatttgggggtgggggttctggttttttatgtatcagtgattgtgactttgcttattttacataccatatctatttgtgtgccacttctcattacctagttcctttatgtattttatagaaaggtggggggaaaatcaagaaagttttctgaataattaccttggcctatatttttgctttaaaatagcaatgctagcgcaggaagtttgctaagtgaaaatttactcagctcttgccatgacggacagaaggattaaatttcaagaaaaagcctttgctcagactaaagcagaatttcaaaacttttgcacctaggatctgggagtatcgcccagagtgaaagatatttttctcaagatttaccataagaaatttagggtggagggagtatgggaattttattttatttttatttatttttgagacgaagtttcgctcttgtcgcccaggctgtagtgcagtggtgcgatcttggctcactgtaatcttgccttctgggtccaagcaattctccttcttcagcctcctgagtagctgggattacaggcatctgccactacacccggctaattttttgtatttttagtagaaacagggtttcaccatgttggccaggctggtcttgaactcctgacctcaggtgatccactgccttcgcctcccaaagtgctgggattacaggtgtgagccaccacacctggctgggaattttatttattgatgtatttttgagacagggccttgccctgttgcccaggttggagtacagtaacacattcacaactccatgctacttcagattcctgggcttaagtggtcctcccgcctttgcctcccaagtagctgggactgcaggtgcactccaccatgcctggctaatttttttttttttttctttttgtgagacaaagtcttactgtcgcccaggctgaagtgaagtggtgggatctcagctgactgcaacctccgcctcctgagttaaagcaattctcgtgtctcagcctccctagtaggtgggattactggcatgcaacaccacgcccagctaaatttttttatatttttagtagagatggggttttactatgttggccaggcttgccttgaactcctgacctcaggtgatccacctgccttggcctcccaaagtgctgggatttacaggtgtgagctaccgcacctggctgggaattttatgtattgatttatttttgagacagggccttgctctgttgcccaggttggagttcagtagcacattcacaactcactgctacttcaaattcctgggcttaagcggtcctcccgcctttgcctcccgagtagctaggactacaggtgcactccactatgcctggctaattttttttttttttttttctttgagacacagtctcgctgtcacctaggctggagtgaagtagtgcgatctcagctcactgcaacctctgcctcctgggttaaagcaattctcgtgtctcagcctcctgaataggtgggattactggtgtgcaacaccacgcccagctaattttttttgtatttttagtagagatggggtttcaccgtgttggccaggctggtttcaaactcctggcctcaaggtatccgcccaccttggcctcccaaagttaattttgttttgatttattttgctcaggttgttctctaattcctgggctcaagcagtccttctgccatggcctcccagagagttgaggttatagttgtgagccactgcacctggccagaattttattttctactccattaggcatttaactaaacacacaaaaaaatttttaagttgataatattcctccaaattaacatccagagcccaattgaactttgccaatatgtgtatgtcttaaagaatctctgttctttagtagtgcttgaggactctaacttgaacttttttgaagcttgtggttaactgagatttattcctctcttttgagaatcaatgtcaagggatagagaaatgttatacaaataaatatggtaaatgtaaggtgcatgatacagcattttaaatagtctttgttgttactttacatatacagttctttatattttaatcttgaatttgtcttaatctatgtcttctctcatacttttgatttgccttcaggtgagaagccatttaaatgtgatcagtgcagttatgtggcctctaatcaacatgaagtaacccgccatgcaagacaggttcacaatgggcctaaacctcttaattgcccacactgtgattacaaaacagcagatagaagcaacttcaaaaaacatgtagagctacatgtgaacccacggcagttcaattgccctgtatgtgactatgcagcttccaagaagtgtaatctacagtatcacttcaaatctaagcatcctacttgtcctaataaaacaatggatgtctcaaaagtgaaactaaagaaaaccaaaaaacgagaggctgacttgcctgataatattaccaatgaaaaaacagaaatagaacaaacaaaaataaaaggggatgtggctggaaagaaaaatgaaaagtccgtcaaagcagagaaaagagatgtctcaaaagagaaaaagccttctaataatgtgtcagtgatccaggtgactaccagaactcgaaaatcagtaacagaggtgaaagagatggatgtgcatacaggaagcaattcagaaaaattcagtaaaactaagaaaagcaaaaggaagctggaagttgacagccattctttacatggtcctgtgaatgatgaggaatcttcaacaaaaaagaaaaagaaggtagaaagcaaatccaaaaataatagtcaggaagtgccaaagggtgacagcaaagtggaggagaataaaaagcaaaatacttgcatgaaaaaaagtacaaagaagaaaactctgaaaaataaatcaagtaagaaaagcagtaagcctcctcagaaggaacctgttgagaagggatctgctcagatggaccctcctcagatggggcctgctcccacagaggcggttcagaaggggcccgttcaggtggagccgccacctcccatggagcatgctcagatggagggtgcccagatacggcctgctcctgacgagcctgttcagatggaggtggttcaggaggggcctgctcagaaggagctgctgcctcccgtggagcctgctcagatggtgggtgcccaaattgtacttgctcacatggagctgcctcctcccatggagactgctcagacggaggttgcccaaatggggcctgctcccatggaacctgctcagatggaggttgcccaggtagaatctgctcccatgcaggtggtccagaaggagcctgttcagatggagctgtctcctcccatggaggtggtccagaaggagcctgttcagatagagctgtctcctcccatggaggtggtccagaaggaacctgttaagatagagctgtctcctcccatagaggtggtccagaaggagcctgttcagatggagttgtctcctcccatgggggtggttcagaaggagcctgctcagagggagccacctcctcccagagagcctccccttcacatggagccaatttccaaaaagcctcctctccgaaaagataaaaaggaaaagtctaacatgcagagtgaaagggcacggaaggagcaagtccttattgaagttggcttagtgcctgttaaagatagctggcttctaaaggaaagtgtaagcacagaggatctctcaccaccatcaccaccactgccaaaggaaaatttaagagaagaggcatcaggagaccaaaaattactcaacacaggtgaaggaaataaagaagcccctcttcagaaagtaggagcagaagaggcagatgagagcctacctggtcttgctgctaatatcaacgaatctacccatatttcatcctctggacaaaacttgaatacgccagagggtgaaactttaaatggtaaacatcagactgacagtatagtttgtgaaatgaaaatggacactgatcagaacacaagagagaatctcactggtataaattcaacagttgaagaaccagtttcaccaatgcttcccccttcagcagtagaagaacgtgaagcagtgtccaaaactgcactggcatcacctcctgctacaatggcagcaaatgagtctcaggaaattgatgaagatgaaggcatccacagccatgaaggaagtgacctaagtgacaacatgtcagagggtagtgatgattctggattgcatggggctcggccagttccacaagaatctagcagaaaaaatgcaaaggaagccttggcagtcaaagcggctaagggagattttgtttgtatcttctgtgatcgttctttcagaaagggaaaagattacagcaaacacctcaatcgccatttggttaatgtgtactatcttgaagaagcagctcaagggcaggagtaatgaaactttgaacaaggtttcagttcttagtttgtaaggtatattacattttatattcatttatgatagcagacaaccttttaagattgctttaattagtatctgatgttgatttttaagtggcattcttttccttaggactttttatgtatacctgttgattgttgtgtaaattttagtaaatctaagagagtgtactaaaccagcaggtatctgttagcttatgtgtttaattgaaattagaaggctaagatggtataacagcattttattgctttgtccagctacaacttgtcatttttttctccatgtcttatcttcctgtttcactttagtttattcttcgttttttattgagatctataaaaaattggcttacttaatagcaaattacttgaagaatttgcctgctttatataaagttagcactttaagatttttttttttagagatgagaagacatttaaattgaagaaaaattcccccagcaatagacagtctatcagtccaagtatttacttcctgagttttgatcaatattttttatttgtgtatgttaatcgtcataaaaacagtgattttggtgtgttttttattttggtgctttaatggcttaagatgttgcacattttttttttcttttggtttctgtttatgtttttttgcctatgcagttaaatttttcctagaaatagcatttgtgttgaacagtaacactttatacatatatatatgcatgtttattttgtttggcgtctttggagggatgcttttagacttgtttgcaaaagggcagttttctttttctttgctgcagttgtctattttgcagaataatagtgtgtgcaagtttgtgagcaaatgaaatatgcaggttcaatctattgattttgatttttacatcttatatctatgccagaatctgtatttcatataacttatttatttcgaatggatgtagtaaattcacagctatcagttttgattttgcaataaataaaccactaggttgcatgtcgaacaaatttttatctcaaataccaaccatcagttttttttttcatgtgttttggtacagctaattcctaattgtagagtgttaaatgtttgaggagaaccttttctcatagatggttggtgttcatatggctactttacaataaagagaactgtaagtgatatttggaaactacaaacctggaattaggagatataattattccttcaagttttatagaatatcacttgggagattccaaagccatagctattacgcggcaaacctaggataagaaaggtagtatgagtgctggtagaccagctgcaactttcctatacagtgaaaaaggctggtgaaacaagtacagtccagattttttaaaatcatactttctcagggatctccacaaactggtgggtgtcctggctgtctgtgtgatagcctctttctataggtgaggcctcaaatgaattgcagctatcctggtgttcctatgagggcactttgtatgaaaaagggcatgtactccaaaacatttttgtaggttctttggccagttgccaaagagtgtgaaagaatccaatagaggatttttcttactgatagcagtcattcattgcagtaaaataaaatatgatcccattagggaatcttgaattctgacctcccatactccgttttgaaataaccactttatatttcattttttaaaaatctgatgatctctttgaggcaggtttcagatttggcagtacaacatgaaagattaggaaaagcattaataacgtgtgggtggaaagcttgttaaaaatctgagagtgaagtttgagttaaaagttgtttgaacatggcattgactgggaggccaaagatttaaagaagcggaagattcttctcttaagacatgaggagtaagttgtgtgataatggtatgtgttttgtgtgcatgaatggacattgtaaatgttgaattctaggctccgacaatcattgtcaacagaagatcaagctgcaaatatttatgttttaaaacttaaattataaagctagttaagtctttctaatgactagttttaatgttcatgggtacattttacctaagttaccgtttacattgtatagaaaaagatacatcttaagcacagattggttattaggaattagtttggggaagaggtttttttgtggattctttcatactgcaaagaaaaaccatttgccttttggggaattgagctaacttctaatctagtcttaagactagaatgctaaaaacaaaaacatgaaggaaattaaaaccccttattattaaattgatttgtaaaaacattgttactggaaatttattggacttgaggccttcctccagaaaataaggacttgattgtcaggcctatattaggttctgaaccttaatgccatgtatttgtacttactaaaaattgtttcaatgaaaagtacattagcagtatgaacttctggtccagttggaagtttttccatttgaaaaatgtgatgtttgcatggaactgtttgaaacttttttattttctagtccccctcccccacactggatagaatttagcctagaattttccctttggataaaagaacaaaaattgaacatgttatttgtaaattgatgtttagtaattagtgataaacttgaaatactagcatatattataagccttaatcttaggtagtcttatgaaaatgaatctcttaactatcttttgaacctgtattcacattggttttcaagatattttaagttatattttttcctcttttcagagctgcttcttattctggggctacttttttttttagttgtgtaattcacaaagggctgcatttttttttttttttaataaggcttataactatggctggatcttttgctctagtcttctaagaagggccattttattttttagagtcacttctaaagtcatgtggtaattaactttggagactgttttgcgtatgagtgctgatacaaattaaaacccaagtagacctcattgcatgtcaccctatgaatgttgacaatggaaggaataccttgcctgtagtatactgtcacttctggattgataagctgaggaagaaagttaagtttcttttttacataagtcagaaaaacttacagctggtgttcctagtttcctggttgacctcagcagatgaagtgaacagatagtgttaattcagattgaagaaattatctgaatcttggtttgtgtagatttacaatctacatgcaatattaactaaatcagatagcttttacagtttcacatgtgtacataggttccctcccggtcccttccatatccattagttattgaactttctaaactggcattgaaacattacaacaatgttttgttgcaccaattttataaacttaagcagtgcaatacgtgttacttttctgaggcaaaccaaaggtaaatttctcaaggttcttgctgccttctttagcagcatttgatggaagatcttttatacatttgtaatagataaaaataaaccagattgcaaatccttttttaaaatcctaaaccatgtaccaagtttttggtccaaattatgtaggataagttaaacttaaattgcattctattaaccaatatgagtgtatttctgtaagcatagttatgttgaaataaagttttaaaaaccatgatgcctttgtttattattggtatatccagaatgtaggaaagccaaatttatgttgctggaactgcaagtgtattaataggcttttgaagattatttctcaggctgggcgcagtggctcacgcctgtaatcccagcactttgggaggctgaggcaggtggatcatgaggtcaggatttcaaggccagcctggccgacatagtgaaaccacgtctctactaaaaatacaaaaattagctgcgtgtggtggcaggcgcctgtaatcccagctactcgggaggctgaggcaagagaatcgcttgaacacaggaggtggaggttgcagtgagccgagatcgtgccattgcacttcagcccaggcgagagtgtgagactctgtctttaaaaaaaaaaaaaaaaaaagtatcacaggtagaaaagtcacagcatgttgtctgaggtaacagtccagtatgggtagtaacccaaagcatacactgcttgatgggaggtgcgggagaaattggacaattcacacaagattttaaatagtaattacttcccaaccacaagtccccttaatagttttcatatgcatatcccttttcagtagcaggcctggaattagtgaattttgattcatgaagatgttttattttatgtatttatttttttttgaaacagtctctgtcgcccaggctggagtgcagtgtcatgatcctagctcactgcaacctctgctgcccgggttcaagcaactctcctgccccagcctcgcaagtagctgggatcacaggcgcccaccaccgcgcctggccaatttttgtatttctagtagagacggggtttcaccacgttggccaggatggtatcgatctcctgacctcctgatccacccgcctcagcctcccaaagtgctgggattacaggcatgagctaccgtgcccggctgttttttataaaatgagacggagttctgtgttgcccagggtggactcagatgatcctcccacctcagtctccctaaatgctgggattacagatgtgagccaccatgcctggcctgtgtgtttttttttttttcttctcccagacggagtcttgctctgtcgcccagactggagtgccatgtcatgatctcctttcactgcaacctcggcctccaggttcaagcgattctcctgcctcagcctcctgagtaactgggattacaggtgtccgccacaacacccagctaatttttgtattttagtagagatggggtttcaccatgtggcccaggctggtctcgaactcctgagctgaagtattcctccgactttggcctcccaaagtgctgggattacaggtgtgagccaccacgcccagcctgttgtttttttgttttgagaaacggtcttactctgtctcccaggctggagtgtggtggcatgatcacagttcctgcagccttgaactcctgggctcaagtggtcttcttgcctcagcctcctgagtagctgggactacagacctaccccaccacgcctcttgccgcctcctctcaaaagcgttcgtattataggcatgagccatcatgccttgccacattttgttttgatgcagtgtcagatctggaagattctgagtcaggagaatggtatttcatatttggattggtgagttattcaccctcttcccacttcctgcaaaactccttatcagcaacaaagcaaaattaacttttttttcctctgagacagggtcttgctctgttgtccgggccgtagtgcagtggcaccatcatggctcacttctgcctcaaccttctggactcaagcaaacctcccacctcagcctcttggagtagctggaactacaggtgcatgccacacacccagctagtttttttctttcttcttttttttctattgacagggttttgccttgctccccaggatggtcttgaactcttggactcaggcagttcacctgcttcggcctcctaaagtgctgggattacaggcgtgagccacaatgcc

SEQ ID NO: 97 - DNA, 7309 bp, Homo sapiens
gtgcgcggcgcagcgtcctgtgttggaatgtgcggctgccgcgagctcgcggcgcagcagcggagcgagcgccgccgaggcccggggccccagaccctggcggcggctgccgcagccgagacggcagggcgaggcccggaggcctgagcaccctctgcagccccactcctgggccttcttggtccacgacggccccagcacccaactttaccaccctcccccacctctcccccgaaactccagcaacaaagaaaagtagtcggagaaggagcggcgactcagggtcgcccgcccctcctcaccgaggaaggccgaatacagttatggccacccaggtaatggggcagtcttctggaggaggagggctgtttaccagcagtggcaacattggaatggccctgcctaacgacatgtatgacttgcatgacctttccaaagctgaactggccgcacctcagcttattatgctggcaaatgtggccttaactggggaagtaaatggcagctgctgtgattacctggtcggtgaagaaagacagatggcagaactgatgccggttggggataacaacttttcagatagtgaagaaggagaaggacttgaagagtctgctgatataaaaggtgaacctcatggactggaaaacatggaactgagaagtttggaactcagcgtcgtagaacctcagcctgtatttgaggcatcaggtgctccagatatttacagttcaaataaagatcttccccctgaaacacctggagcggaggacaaaggcaagagctcgaagaccaaaccctttcgctgtaagccatgccaatatgaagcagaatctgaagaacagtttgtgcatcacatcagagttcacagtgctaagaaattttttgtggaagagagtgcagagaagcaggcaaaagccagggaatctggctcttccactgcagaagagggagatttctccaagggccccattcgctgtgaccgctgcggctacaatactaatcgatatgatcactatacagcacacctgaaacaccacaccagagctggggataatgagcgagtctacaagtgtatcatttgcacatacacaacagtgagcgagtatcactggaggaaacatttaagaaaccattttccaaggaaagtatacacatgtggaaaatgcaactatttttcagacagaaaaaacaattatgttcagcatgttagaactcatacaggagaacgcccatataaatgtgaactttgtccttactcaagttctcagaagactcatctaactagacatatgcgtactcattcaggtgagaagccatttaaatgtgatcagtgcagttatgtggcctctaatcaacatgaagtaacccgccatgcaagacaggttcacaatgggcctaaacctcttaattgcccacactgtgattacaaaacagcagatagaagcaacttcaaaaaacatgtagagctacatgtgaacccacggcagttcaattgccctgtatgtgactatgcagcttccaagaagtgtaatctacagtatcacttcaaatctaagcatcctacttgtcctaataaaacaatggatgtctcaaaagtgaaactaaagaaaaccaaaaaacgagaggctgacttgcctgataatattaccaatgaaaaaacagaaatagaacaaacaaaaataaaaggggatgtggctggaaagaaaaatgaaaagtccgtcaaagcagagaaaagagatgtctcaaaagagaaaaagccttctaataatgtgtcagtgatccaggtgactaccagaactcgaaaatcagtaacagaggtgaaagagatggatgtgcatacaggaagcaattcagaaaaattcagtaaaactaagaaaagcaaaaggaagctggaagttgacagccattctttacatggtcctgtgaatgatgaggaatcttcaacaaaaaagaaaaagaaggtagaaagcaaatccaaaaataatagtcaggaagtgccaaagggtgacagcaaagtggaggagaataaaaagcaaaatacttgcatgaaaaaaagtacaaagaagaaaactctgaaaaataaatcaagtaagaaaagcagtaagcctcctcagaaggaacctgttgagaagggatctgctcagatggaccctcctcagatggggcctgctcccacagaggcggttcagaaggggcccgttcaggtggagccgccacctcccatggagcatgctcagatggagggtgcccagatacggcctgctcctgacgagcctgttcagatggaggtggttcaggaggggcctgctcagaaggagctgctgcctcccgtggagcctgctcagatggtgggtgcccaaattgtacttgctcacatggagctgcctcctcccatggagactgctcagacggaggttgcccaaatggggcctgctcccatggaacctgctcagatggaggttgcccaggtagaatctgctcccatgcaggtggtccagaaggagcctgttcagatggagctgtctcctcccatggaggtggtccagaaggagcctgttcagatagagctgtctcctcccatggaggtggtccagaaggaacctgttaagatagagctgtctcctcccatagaggtggtccagaaggagcctgttcagatggagttgtctcctcccatgggggtggttcagaaggagcctgctcagagggagccacctcctcccagagagcctccccttcacatggagccaatttccaaaaagcctcctctccgaaaagataaaaaggaaaagtctaacatgcagagtgaaagggcacggaaggagcaagtccttattgaagttggcttagtgcctgttaaagatagctggcttctaaaggaaagtgtaagcacagaggatctctcaccaccatcaccaccactgccaaaggaaaatttaagagaagaggcatcaggagaccaaaaattactcaacacaggtgaaggaaataaagaagcccctcttcagaaagtaggagcagaagaggcagatgagagcctacctggtcttgctgctaatatcaacgaatctacccatatttcatcctctggacaaaacttgaatacgccagagggtgaaactttaaatggtaaacatcagactgacagtatagtttgtgaaatgaaaatggacactgatcagaacacaagagagaatctcactggtataaattcaacagttgaagaaccagtttcaccaatgcttcccccttcagcagtagaagaacgtgaagcagtgtccaaaactgcactggcatcacctcctgctacaatggcagcaaatgagtctcaggaaattgatgaagatgaaggcatccacagccatgaaggaagtgacctaagtgacaacatgtcagagggtagtgatgattctggattgcatggggctcggccagttccacaagaatctagcagaaaaaatgcaaaggaagccttggcagtcaaagcggctaagggagattttgtttgtatcttctgtgatcgttctttcagaaagggaaaagattacagcaaacacctcaatcgccatttggttaatgtgtactatcttgaagaagcagctcaagggcaggagtaatgaaactttgaacaaggtttcagttcttagtttgtaaggtatattacattttatattcatttatgatagcagacaaccttttaagattgctttaattagtatctgatgttgatttttaagtggcattcttttccttaggactttttatgtatacctgttgattgttgtgtaaattttagtaaatctaagagagtgtactaaaccagcaggtatctgttagcttatgtgtttaattgaaattagaaggctaagatggtataacagcattttattgctttgtccagctacaacttgtcatttttttctccatgtcttatcttcctgtttcactttagtttattcttcgttttttattgagatctataaaaaattggcttacttaatagcaaattacttgaagaatttgcctgctttatataaagttagcactttaagatttttttttttagagatgagaagacatttaaattgaagaaaaattcccccagcaatagacagtctatcagtccaagtatttacttcctgagttttgatcaatattttttatttgtgtatgttaatcgtcataaaaacagtgattttggtgtgttttttattttggtgctttaatggcttaagatgttgcacattttttttttcttttggtttctgtttatgtttttttgcctatgcagttaaatttttcctagaaatagcatttgtgttgaacagtaacactttatacatatatatatgcatgtttattttgtttggcgtctttggagggatgcttttagacttgtttgcaaaagggcagttttctttttctttgctgcagttgtctattttgcagaataatagtgtgtgcaagtttgtgagcaaatgaaatatgcaggttcaatctattgattttgatttttacatcttatatctatgccagaatctgtatttcatataacttatttatttcgaatggatgtagtaaattcacagctatcagttttgattttgcaataaataaaccactaggttgcatgtcgaacaaatttttatctcaaataccaaccatcagttttttttttcatgtgttttggtacagctaattcctaattgtagagtgttaaatgtttgaggagaaccttttctcatagatggttggtgttcatatggctactttacaataaagagaactgtaagtgatatttggaaactacaaacctggaattaggagatataattattccttcaagttttatagaatatcacttgggagattccaaagccatagctattacgcggcaaacctaggataagaaaggtagtatgagtgctggtagaccagctgcaactttcctatacagtgaaaaaggctggtgaaacaagtacagtccagattttttaaaatcatactttctcagggatctccacaaactggtgggtgtcctggctgtctgtgtgatagcctctttctataggtgaggcctcaaatgaattgcagctatcctggtgttcctatgagggcactttgtatgaaaaagggcatgtactccaaaacatttttgtaggttctttggccagttgccaaagagtgtgaaagaatccaatagaggatttttcttactgatagcagtcattcattgcagtaaaataaaatatgatcccattagggaatcttgaattctgacctcccatactccgttttgaaataaccactttatatttcattttttaaaaatctgatgatctctttgaggcaggtttcagatttggcagtacaacatgaaagattaggaaaagcattaataacgtgtgggtggaaagcttgttaaaaatctgagagtgaagtttgagttaaaagttgtttgaacatggcattgactgggaggccaaagatttaaagaagcggaagattcttctcttaagacatgaggagtaagttgtgtgataatggtatgtgttttgtgtgcatgaatggacattgtaaatgttgaattctaggctccgacaatcattgtcaacagaagatcaagctgcaaatatttatgttttaaaacttaaattataaagctagttaagtctttctaatgactagttttaatgttcatgggtacattttacctaagttaccgtttacattgtatagaaaaagatacatcttaagcacagattggttattaggaattagtttggggaagaggtttttttgtggattctttcatactgcaaagaaaaaccatttgccttttggggaattgagctaacttctaatctagtcttaagactagaatgctaaaaacaaaaacatgaaggaaattaaaaccccttattattaaattgatttgtaaaaacattgttactggaaatttattggacttgaggccttcctccagaaaataaggacttgattgtcaggcctatattaggttctgaaccttaatgccatgtatttgtacttactaaaaattgtttcaatgaaaagtacattagcagtatgaacttctggtccagttggaagtttttccatttgaaaaatgtgatgtttgcatggaactgtttgaaacttttttattttctagtccccctcccccacactggatagaatttagcctagaattttccctttggataaaagaacaaaaattgaacatgttatttgtaaattgatgtttagtaattagtgataaacttgaaatactagcatatattataagccttaatcttaggtagtcttatgaaaatgaatctcttaactatcttttgaacctgtattcacattggttttcaagatattttaagttatattttttcctcttttcagagctgcttcttattctggggctacttttttttttagttgtgtaattcacaaagggctgcatttttttttttttttaataaggcttataactatggctggatcttttgctctagtcttctaagaagggccattttattttttagagtcacttctaaagtcatgtggtaattaactttggagactgttttgcgtatgagtgctgatacaaattaaaacccaagtagacctcattgcatgtcaccctatgaatgttgacaatggaaggaataccttgcctgtagtatactgtcacttctggattgataagctgaggaagaaagttaagtttcttttttacataagtcagaaaaacttacagctggtgttcctagtttcctggttgacctcagcagatgaagtgaacagatagtgttaattcagattgaagaaattatctgaatcttggtttgtgtagatttacaatctacatgcaatattaactaaatcagatagcttttacagtttcacatgtgtacataggttccctcccggtcccttccatatccattagttattgaactttctaaactggcattgaaacattacaacaatgttttgttgcaccaattttataaacttaagcagtgcaatacgtgttacttttctgaggcaaaccaaaggtaaatttctcaaggttcttgctgccttctttagcagcatttgatggaagatcttttatacatttgtaatagataaaaataaaccagattgcaaatccttttttaaaatcctaaaccatgtaccaagtttttggtccaaattatgtaggataagttaaacttaaattgcattctattaaccaatatgagtgtatttctgtaagcatagttatgttgaaataaagttttaaaaacca

SEQ ID NO: 98 - DNA, 7122 bp, Homo sapiens
cggcgctcggagcccgacgcctcgcgagggcgcccgcggagcctccccggccctgggcgttgggcgagccccggggcggtcggaggggcccgggggcggtcggagaagcccggacgccggctgcgcgaatacagttatggccacccaggtaatggggcagtcttctggaggaggagggctgtttaccagcagtggcaacattggaatggccctgcctaacgacatgtatgacttgcatgacctttccaaagctgaactggccgcacctcagcttattatgctggcaaatgtggccttaactggggaagtaaatggcagctgctgtgattacctggtcggtgaagaaagacagatggcagaactgatgccggttggggataacaacttttcagatagtgaagaaggagaaggacttgaagagtctgctgatataaaaggtgaacctcatggactggaaaacatggaactgagaagtttggaactcagcgtcgtagaacctcagcctgtatttgaggcatcaggtgctccagatatttacagttcaaataaagatcttccccctgaaacacctggagcggaggacaaaggcaagagctcgaagaccaaaccctttcgctgtaagccatgccaatatgaagcagaatctgaagaacagtttgtgcatcacatcagagttcacagtgctaagaaattttttgtggaagagagtgcagagaagcaggcaaaagccagggaatctggctcttccactgcagaagagggagatttctccaagggccccattcgctgtgaccgctgcggctacaatactaatcgatatgatcactatacagcacacctgaaacaccacaccagagctggggataatgagcgagtctacaagtgtatcatttgcacatacacaacagtgagcgagtatcactggaggaaacatttaagaaaccattttccaaggaaagtatacacatgtggaaaatgcaactatttttcagacagaaaaaacaattatgttcagcatgttagaactcatacaggagaacgcccatataaatgtgaactttgtccttactcaagttctcagaagactcatctaactagacatatgcgtactcattcaggtgagaagccatttaaatgtgatcagtgcagttatgtggcctctaatcaacatgaagtaacccgccatgcaagacaggttcacaatgggcctaaacctcttaattgcccacactgtgattacaaaacagcagatagaagcaacttcaaaaaacatgtagagctacatgtgaacccacggcagttcaattgccctgtatgtgactatgcagcttccaagaagtgtaatctacagtatcacttcaaatctaagcatcctacttgtcctaataaaacaatggatgtctcaaaagtgaaactaaagaaaaccaaaaaacgagaggctgacttgcctgataatattaccaatgaaaaaacagaaatagaacaaacaaaaataaaaggggatgtggctggaaagaaaaatgaaaagtccgtcaaagcagagaaaagagatgtctcaaaagagaaaaagccttctaataatgtgtcagtgatccaggtgactaccagaactcgaaaatcagtaacagaggtgaaagagatggatgtgcatacaggaagcaattcagaaaaattcagtaaaactaagaaaagcaaaaggaagctggaagttgacagccattctttacatggtcctgtgaatgatgaggaatcttcaacaaaaaagaaaaagaaggtagaaagcaaatccaaaaataatagtcaggaagtgccaaagggtgacagcaaagtggaggagaataaaaagcaaaatacttgcatgaaaaaaagtacaaagaagaaaactctgaaaaataaatcaagtaagaaaagcagtaagcctcctcagaaggaacctgttgagaagggatctgctcagatggaccctcctcagatggggcctgctcccacagaggcggttcagaaggggcccgttcaggtggagccgccacctcccatggagcatgctcagatggagggtgcccagatacggcctgctcctgacgagcctgttcagatggaggtggttcaggaggggcctgctcagaaggagctgctgcctcccgtggagcctgctcagatggtgggtgcccaaattgtacttgctcacatggagctgcctcctcccatggagactgctcagacggaggttgcccaaatggggcctgctcccatggaacctgctcagatggaggttgcccaggtagaatctgctcccatgcaggtggtccagaaggagcctgttcagatggagctgtctcctcccatggaggtggtccagaaggagcctgttcagatagagctgtctcctcccatggaggtggtccagaaggaacctgttaagatagagctgtctcctcccatagaggtggtccagaaggagcctgttcagatggagttgtctcctcccatgggggtggttcagaaggagcctgctcagagggagccacctcctcccagagagcctccccttcacatggagccaatttccaaaaagcctcctctccgaaaagataaaaaggaaaagtctaacatgcagagtgaaagggcacggaaggagcaagtccttattgaagttggcttagtgcctgttaaagatagctggcttctaaaggaaagtgtaagcacagaggatctctcaccaccatcaccaccactgccaaaggaaaatttaagagaagaggcatcaggagaccaaaaattactcaacacaggtgaaggaaataaagaagcccctcttcagaaagtaggagcagaagaggcagatgagagcctacctggtcttgctgctaatatcaacgaatctacccatatttcatcctctggacaaaacttgaatacgccagagggtgaaactttaaatggtaaacatcagactgacagtatagtttgtgaaatgaaaatggacactgatcagaacacaagagagaatctcactggtataaattcaacagttgaagaaccagtttcaccaatgcttcccccttcagcagtagaagaacgtgaagcagtgtccaaaactgcactggcatcacctcctgctacaatggcagcaaatgagtctcaggaaattgatgaagatgaaggcatccacagccatgaaggaagtgacctaagtgacaacatgtcagagggtagtgatgattctggattgcatggggctcggccagttccacaagaatctagcagaaaaaatgcaaaggaagccttggcagtcaaagcggctaagggagattttgtttgtatcttctgtgatcgttctttcagaaagggaaaagattacagcaaacacctcaatcgccatttggttaatgtgtactatcttgaagaagcagctcaagggcaggagtaatgaaactttgaacaaggtttcagttcttagtttgtaaggtatattacattttatattcatttatgatagcagacaaccttttaagattgctttaattagtatctgatgttgatttttaagtggcattcttttccttaggactttttatgtatacctgttgattgttgtgtaaattttagtaaatctaagagagtgtactaaaccagcaggtatctgttagcttatgtgtttaattgaaattagaaggctaagatggtataacagcattttattgctttgtccagctacaacttgtcatttttttctccatgtcttatcttcctgtttcactttagtttattcttcgttttttattgagatctataaaaaattggcttacttaatagcaaattacttgaagaatttgcctgctttatataaagttagcactttaagatttttttttttagagatgagaagacatttaaattgaagaaaaattcccccagcaatagacagtctatcagtccaagtatttacttcctgagttttgatcaatattttttatttgtgtatgttaatcgtcataaaaacagtgattttggtgtgttttttattttggtgctttaatggcttaagatgttgcacattttttttttcttttggtttctgtttatgtttttttgcctatgcagttaaatttttcctagaaatagcatttgtgttgaacagtaacactttatacatatatatatgcatgtttattttgtttggcgtctttggagggatgcttttagacttgtttgcaaaagggcagttttctttttctttgctgcagttgtctattttgcagaataatagtgtgtgcaagtttgtgagcaaatgaaatatgcaggttcaatctattgattttgatttttacatcttatatctatgccagaatctgtatttcatataacttatttatttcgaatggatgtagtaaattcacagctatcagttttgattttgcaataaataaaccactaggttgcatgtcgaacaaatttttatctcaaataccaaccatcagttttttttttcatgtgttttggtacagctaattcctaattgtagagtgttaaatgtttgaggagaaccttttctcatagatggttggtgttcatatggctactttacaataaagagaactgtaagtgatatttggaaactacaaacctggaattaggagatataattattccttcaagttttatagaatatcacttgggagattccaaagccatagctattacgcggcaaacctaggataagaaaggtagtatgagtgctggtagaccagctgcaactttcctatacagtgaaaaaggctggtgaaacaagtacagtccagattttttaaaatcatactttctcagggatctccacaaactggtgggtgtcctggctgtctgtgtgatagcctctttctataggtgaggcctcaaatgaattgcagctatcctggtgttcctatgagggcactttgtatgaaaaagggcatgtactccaaaacatttttgtaggttctttggccagttgccaaagagtgtgaaagaatccaatagaggatttttcttactgatagcagtcattcattgcagtaaaataaaatatgatcccattagggaatcttgaattctgacctcccatactccgttttgaaataaccactttatatttcattttttaaaaatctgatgatctctttgaggcaggtttcagatttggcagtacaacatgaaagattaggaaaagcattaataacgtgtgggtggaaagcttgttaaaaatctgagagtgaagtttgagttaaaagttgtttgaacatggcattgactgggaggccaaagatttaaagaagcggaagattcttctcttaagacatgaggagtaagttgtgtgataatggtatgtgttttgtgtgcatgaatggacattgtaaatgttgaattctaggctccgacaatcattgtcaacagaagatcaagctgcaaatatttatgttttaaaacttaaattataaagctagttaagtctttctaatgactagttttaatgttcatgggtacattttacctaagttaccgtttacattgtatagaaaaagatacatcttaagcacagattggttattaggaattagtttggggaagaggtttttttgtggattctttcatactgcaaagaaaaaccatttgccttttggggaattgagctaacttctaatctagtcttaagactagaatgctaaaaacaaaaacatgaaggaaattaaaaccccttattattaaattgatttgtaaaaacattgttactggaaatttattggacttgaggccttcctccagaaaataaggacttgattgtcaggcctatattaggttctgaaccttaatgccatgtatttgtacttactaaaaattgtttcaatgaaaagtacattagcagtatgaacttctggtccagttggaagtttttccatttgaaaaatgtgatgtttgcatggaactgtttgaaacttttttattttctagtccccctcccccacactggatagaatttagcctagaattttccctttggataaaagaacaaaaattgaacatgttatttgtaaattgatgtttagtaattagtgataaacttgaaatactagcatatattataagccttaatcttaggtagtcttatgaaaatgaatctcttaactatcttttgaacctgtattcacattggttttcaagatattttaagttatattttttcctcttttcagagctgcttcttattctggggctacttttttttttagttgtgtaattcacaaagggctgcatttttttttttttttaataaggcttataactatggctggatcttttgctctagtcttctaagaagggccattttattttttagagtcacttctaaagtcatgtggtaattaactttggagactgttttgcgtatgagtgctgatacaaattaaaacccaagtagacctcattgcatgtcaccctatgaatgttgacaatggaaggaataccttgcctgtagtatactgtcacttctggattgataagctgaggaagaaagttaagtttcttttttacataagtcagaaaaacttacagctggtgttcctagtttcctggttgacctcagcagatgaagtgaacagatagtgttaattcagattgaagaaattatctgaatcttggtttgtgtagatttacaatctacatgcaatattaactaaatcagatagcttttacagtttcacatgtgtacataggttccctcccggtcccttccatatccattagttattgaactttctaaactggcattgaaacattacaacaatgttttgttgcaccaattttataaacttaagcagtgcaatacgtgttacttttctgaggcaaaccaaaggtaaatttctcaaggttcttgctgccttctttagcagcatttgatggaagatcttttatacatttgtaatagataaaaataaaccagattgcaaatccttttttaaaatcctaaaccatgtaccaagtttttggtccaaattatgtaggataagttaaacttaaattgcattctattaaccaatatgagtgtatttctgtaagcatagttatgttgaaataaagttttaaaaacca

SEQ ID NO: 99 - DNA, 7841 bp, Homo sapiens
acagcgatttctgcgcttcagccgtccggcgccgctggcccccgcgtccggccacccgaccgctggagctggcggggctggggcgcgcgtcctgccgggcgccgtgggggagtgaagttcgcaaacttccggggcgcgggggtggcggctggcccgtgtgggggccccctccggcgctcggagcccgacgcctcgcgagggcgcccgcggagcctccccggccctgggcgttgggcgagccccggggcggtcggaggggcccgggggcggtcggagaagcccggacgccggctgcgcggtaactttccgtcctctcccgggacgggggccctagggctggggagggggctgcctggactcggggaggactggttccggccaaacagcgcctcgagcttgatcccctcccccgttttagtgttggagagcgcaggaaaaggctcaggacgagtgtcggggcgactcccgcgagttggtgtgtaaatgtgtgcagtgagcgggccgaggcgagaggaagcgagagcgcccgagtttgcaaagagctgctttgtgtttggtattttgagaaaatggccgaatgcctatttcagttaggaatgccgccgccgaggcaggcgctggtggcagcagcacggaggaattcgtgcagcacgttgggctttcgggctgtgcctggacggtcttcctaacaatcgttaaaattccatttggggtggcagttaggggttagggagcaattagaaaagtcgatgttgggccaaattacccaatagcttgggctgttcagccccgggacagccttcgccctctgttttctgtgatggcatttgcttccaacttttgttgaatacagttatggccacccaggtaatggggcagtcttctggaggaggagggctgtttaccagcagtggcaacattggaatggccctgcctaacgacatgtatgacttgcatgacctttccaaagctgaactggccgcacctcagcttattatgctggcaaatgtggccttaactggggaagtaaatggcagctgctgtgattacctggtcggtgaagaaagacagatggcagaactgatgccggttggggataacaacttttcagatagtgaagaaggagaaggacttgaagagtctgctgatataaaaggtgaacctcatggactggaaaacatggaactgagaagtttggaactcagcgtcgtagaacctcagcctgtatttgaggcatcaggtgctccagatatttacagttcaaataaagatcttccccctgaaacacctggagcggaggacaaaggcaagagctcgaagaccaaaccctttcgctgtaagccatgccaatatgaagcagaatctgaagaacagtttgtgcatcacatcagagttcacagtgctaagaaattttttgtggaagagagtgcagagaagcaggcaaaagccagggaatctggctcttccactgcagaagagggagatttctccaagggccccattcgctgtgaccgctgcggctacaatactaatcgatatgatcactatacagcacacctgaaacaccacaccagagctggggataatgagcgagtctacaagtgtatcatttgcacatacacaacagtgagcgagtatcactggaggaaacatttaagaaaccattttccaaggaaagtatacacatgtggaaaatgcaactatttttcagacagaaaaaacaattatgttcagcatgttagaactcatacaggagaacgcccatataaatgtgaactttgtccttactcaagttctcagaagactcatctaactagacatatgcgtactcattcaggtgagaagccatttaaatgtgatcagtgcagttatgtggcctctaatcaacatgaagtaacccgccatgcaagacaggttcacaatgggcctaaacctcttaattgcccacactgtgattacaaaacagcagatagaagcaacttcaaaaaacatgtagagctacatgtgaacccacggcagttcaattgccctgtatgtgactatgcagcttccaagaagtgtaatctacagtatcacttcaaatctaagcatcctacttgtcctaataaaacaatggatgtctcaaaagtgaaactaaagaaaaccaaaaaacgagaggctgacttgcctgataatattaccaatgaaaaaacagaaatagaacaaacaaaaataaaaggggatgtggctggaaagaaaaatgaaaagtccgtcaaagcagagaaaagagatgtctcaaaagagaaaaagccttctaataatgtgtcagtgatccaggtgactaccagaactcgaaaatcagtaacagaggtgaaagagatggatgtgcatacaggaagcaattcagaaaaattcagtaaaactaagaaaagcaaaaggaagctggaagttgacagccattctttacatggtcctgtgaatgatgaggaatcttcaacaaaaaagaaaaagaaggtagaaagcaaatccaaaaataatagtcaggaagtgccaaagggtgacagcaaagtggaggagaataaaaagcaaaatacttgcatgaaaaaaagtacaaagaagaaaactctgaaaaataaatcaagtaagaaaagcagtaagcctcctcagaaggaacctgttgagaagggatctgctcagatggaccctcctcagatggggcctgctcccacagaggcggttcagaaggggcccgttcaggtggagccgccacctcccatggagcatgctcagatggagggtgcccagatacggcctgctcctgacgagcctgttcagatggaggtggttcaggaggggcctgctcagaaggagctgctgcctcccgtggagcctgctcagatggtgggtgcccaaattgtacttgctcacatggagctgcctcctcccatggagactgctcagacggaggttgcccaaatggggcctgctcccatggaacctgctcagatggaggttgcccaggtagaatctgctcccatgcaggtggtccagaaggagcctgttcagatggagctgtctcctcccatggaggtggtccagaaggagcctgttcagatagagctgtctcctcccatggaggtggtccagaaggaacctgttaagatagagctgtctcctcccatagaggtggtccagaaggagcctgttcagatggagttgtctcctcccatgggggtggttcagaaggagcctgctcagagggagccacctcctcccagagagcctccccttcacatggagccaatttccaaaaagcctcctctccgaaaagataaaaaggaaaagtctaacatgcagagtgaaagggcacggaaggagcaagtccttattgaagttggcttagtgcctgttaaagatagctggcttctaaaggaaagtgtaagcacagaggatctctcaccaccatcaccaccactgccaaaggaaaatttaagagaagaggcatcaggagaccaaaaattactcaacacaggtgaaggaaataaagaagcccctcttcagaaagtaggagcagaagaggcagatgagagcctacctggtcttgctgctaatatcaacgaatctacccatatttcatcctctggacaaaacttgaatacgccagagggtgaaactttaaatggtaaacatcagactgacagtatagtttgtgaaatgaaaatggacactgatcagaacacaagagagaatctcactggtataaattcaacagttgaagaaccagtttcaccaatgcttcccccttcagcagtagaagaacgtgaagcagtgtccaaaactgcactggcatcacctcctgctacaatggcagcaaatgagtctcaggaaattgatgaagatgaaggcatccacagccatgaaggaagtgacctaagtgacaacatgtcagagggtagtgatgattctggattgcatggggctcggccagttccacaagaatctagcagaaaaaatgcaaaggaagccttggcagtcaaagcggctaagggagattttgtttgtatcttctgtgatcgttctttcagaaagggaaaagattacagcaaacacctcaatcgccatttggttaatgtgtactatcttgaagaagcagctcaagggcaggagtaatgaaactttgaacaaggtttcagttcttagtttgtaaggtatattacattttatattcatttatgatagcagacaaccttttaagattgctttaattagtatctgatgttgatttttaagtggcattcttttccttaggactttttatgtatacctgttgattgttgtgtaaattttagtaaatctaagagagtgtactaaaccagcaggtatctgttagcttatgtgtttaattgaaattagaaggctaagatggtataacagcattttattgctttgtccagctacaacttgtcatttttttctccatgtcttatcttcctgtttcactttagtttattcttcgttttttattgagatctataaaaaattggcttacttaatagcaaattacttgaagaatttgcctgctttatataaagttagcactttaagatttttttttttagagatgagaagacatttaaattgaagaaaaattcccccagcaatagacagtctatcagtccaagtatttacttcctgagttttgatcaatattttttatttgtgtatgttaatcgtcataaaaacagtgattttggtgtgttttttattttggtgctttaatggcttaagatgttgcacattttttttttcttttggtttctgtttatgtttttttgcctatgcagttaaatttttcctagaaatagcatttgtgttgaacagtaacactttatacatatatatatgcatgtttattttgtttggcgtctttggagggatgcttttagacttgtttgcaaaagggcagttttctttttctttgctgcagttgtctattttgcagaataatagtgtgtgcaagtttgtgagcaaatgaaatatgcaggttcaatctattgattttgatttttacatcttatatctatgccagaatctgtatttcatataacttatttatttcgaatggatgtagtaaattcacagctatcagttttgattttgcaataaataaaccactaggttgcatgtcgaacaaatttttatctcaaataccaaccatcagttttttttttcatgtgttttggtacagctaattcctaattgtagagtgttaaatgtttgaggagaaccttttctcatagatggttggtgttcatatggctactttacaataaagagaactgtaagtgatatttggaaactacaaacctggaattaggagatataattattccttcaagttttatagaatatcacttgggagattccaaagccatagctattacgcggcaaacctaggataagaaaggtagtatgagtgctggtagaccagctgcaactttcctatacagtgaaaaaggctggtgaaacaagtacagtccagattttttaaaatcatactttctcagggatctccacaaactggtgggtgtcctggctgtctgtgtgatagcctctttctataggtgaggcctcaaatgaattgcagctatcctggtgttcctatgagggcactttgtatgaaaaagggcatgtactccaaaacatttttgtaggttctttggccagttgccaaagagtgtgaaagaatccaatagaggatttttcttactgatagcagtcattcattgcagtaaaataaaatatgatcccattagggaatcttgaattctgacctcccatactccgttttgaaataaccactttatatttcattttttaaaaatctgatgatctctttgaggcaggtttcagatttggcagtacaacatgaaagattaggaaaagcattaataacgtgtgggtggaaagcttgttaaaaatctgagagtgaagtttgagttaaaagttgtttgaacatggcattgactgggaggccaaagatttaaagaagcggaagattcttctcttaagacatgaggagtaagttgtgtgataatggtatgtgttttgtgtgcatgaatggacattgtaaatgttgaattctaggctccgacaatcattgtcaacagaagatcaagctgcaaatatttatgttttaaaacttaaattataaagctagttaagtctttctaatgactagttttaatgttcatgggtacattttacctaagttaccgtttacattgtatagaaaaagatacatcttaagcacagattggttattaggaattagtttggggaagaggtttttttgtggattctttcatactgcaaagaaaaaccatttgccttttggggaattgagctaacttctaatctagtcttaagactagaatgctaaaaacaaaaacatgaaggaaattaaaaccccttattattaaattgatttgtaaaaacattgttactggaaatttattggacttgaggccttcctccagaaaataaggacttgattgtcaggcctatattaggttctgaaccttaatgccatgtatttgtacttactaaaaattgtttcaatgaaaagtacattagcagtatgaacttctggtccagttggaagtttttccatttgaaaaatgtgatgtttgcatggaactgtttgaaacttttttattttctagtccccctcccccacactggatagaatttagcctagaattttccctttggataaaagaacaaaaattgaacatgttatttgtaaattgatgtttagtaattagtgataaacttgaaatactagcatatattataagccttaatcttaggtagtcttatgaaaatgaatctcttaactatcttttgaacctgtattcacattggttttcaagatattttaagttatattttttcctcttttcagagctgcttcttattctggggctacttttttttttagttgtgtaattcacaaagggctgcatttttttttttttttaataaggcttataactatggctggatcttttgctctagtcttctaagaagggccattttattttttagagtcacttctaaagtcatgtggtaattaactttggagactgttttgcgtatgagtgctgatacaaattaaaacccaagtagacctcattgcatgtcaccctatgaatgttgacaatggaaggaataccttgcctgtagtatactgtcacttctggattgataagctgaggaagaaagttaagtttcttttttacataagtcagaaaaacttacagctggtgttcctagtttcctggttgacctcagcagatgaagtgaacagatagtgttaattcagattgaagaaattatctgaatcttggtttgtgtagatttacaatctacatgcaatattaactaaatcagatagcttttacagtttcacatgtgtacataggttccctcccggtcccttccatatccattagttattgaactttctaaactggcattgaaacattacaacaatgttttgttgcaccaattttataaacttaagcagtgcaatacgtgttacttttctgaggcaaaccaaaggtaaatttctcaaggttcttgctgccttctttagcagcatttgatggaagatcttttatacatttgtaatagataaaaataaaccagattgcaaatccttttttaaaatcctaaaccatgtaccaagtttttggtccaaattatgtaggataagttaaacttaaattgcattctattaaccaatatgagtgtatttctgtaagcatagttatgttgaaataaagttttaaaaacca

SEQ ID NO: 100 - DNA, 7213 bp, Homo sapiens
tcctgtgttggaatgtgcggctgccgcgagctcgcggcgcagcagcggagcgagcgccgccgaggcccggggccccagaccctggcggcggctgccgcagccgagacggcagggcgaggcccggaggcctgagcaccctctgcagccccactcctgggccttcttggtccacgacggccccagcacccaactttaccaccctcccccacctctcccccgaaactccagcaacaaagaaaagtagtcggagaaggagcggcgactcagggtcgcccgcccctcctcaccgaggaaggccgaatacagttatggccacccaggtaatggggcagtcttctggaggaggagggctgtttaccagcagtggcaacattggaatggccctgcctaacgacatgtatgacttgcatgacctttccaaagctgaactggccgcacctcagcttattatgctggcaaatgtggccttaactggggaagtaaatggcagctgctgtgattacctggtcggtgaagaaagacagatggcagaactgatgccggttggggataacaacttttcagatagtgaagaaggagaaggacttgaagagtctgctgatataaaaggtgaacctcatggactggaaaacatggaactgagaagtttggaactcagcgtcgtagaacctcagcctgtatttgaggcatcaggtgctccagatatttacagttcaaataaagatcttccccctgaaacacctggagcggaggacaaaggcaagagctcgaagaccaaaccctttcgctgtaagccatgccaatatgaagcagaatctgaagaacagtttgtgcatcacatcagagttcacagtgctaagaaattttttgtggaagagagtgcagagaagcaggcaaaagccagggaatctggctcttccactgcagaagagggagatttctccaagggccccattcgctgtgaccgctgcggctacaatactaatcgatatgatcactatacagcacacctgaaacaccacaccagagctggggataatgagcgagtctacaagtgtatcatttgcacatacacaacagtgagcgagtatcactggaggaaacatttaagaaaccattttccaaggaaagtatacacatgtggaaaatgcaactatttttcagacagaaaaaacaattatgttcagcatgttagaactcatacaggtgagaagccatttaaatgtgatcagtgcagttatgtggcctctaatcaacatgaagtaacccgccatgcaagacaggttcacaatgggcctaaacctcttaattgcccacactgtgattacaaaacagcagatagaagcaacttcaaaaaacatgtagagctacatgtgaacccacggcagttcaattgccctgtatgtgactatgcagcttccaagaagtgtaatctacagtatcacttcaaatctaagcatcctacttgtcctaataaaacaatggatgtctcaaaagtgaaactaaagaaaaccaaaaaacgagaggctgacttgcctgataatattaccaatgaaaaaacagaaatagaacaaacaaaaataaaaggggatgtggctggaaagaaaaatgaaaagtccgtcaaagcagagaaaagagatgtctcaaaagagaaaaagccttctaataatgtgtcagtgatccaggtgactaccagaactcgaaaatcagtaacagaggtgaaagagatggatgtgcatacaggaagcaattcagaaaaattcagtaaaactaagaaaagcaaaaggaagctggaagttgacagccattctttacatggtcctgtgaatgatgaggaatcttcaacaaaaaagaaaaagaaggtagaaagcaaatccaaaaataatagtcaggaagtgccaaagggtgacagcaaagtggaggagaataaaaagcaaaatacttgcatgaaaaaaagtacaaagaagaaaactctgaaaaataaatcaagtaagaaaagcagtaagcctcctcagaaggaacctgttgagaagggatctgctcagatggaccctcctcagatggggcctgctcccacagaggcggttcagaaggggcccgttcaggtggagccgccacctcccatggagcatgctcagatggagggtgcccagatacggcctgctcctgacgagcctgttcagatggaggtggttcaggaggggcctgctcagaaggagctgctgcctcccgtggagcctgctcagatggtgggtgcccaaattgtacttgctcacatggagctgcctcctcccatggagactgctcagacggaggttgcccaaatggggcctgctcccatggaacctgctcagatggaggttgcccaggtagaatctgctcccatgcaggtggtccagaaggagcctgttcagatggagctgtctcctcccatggaggtggtccagaaggagcctgttcagatagagctgtctcctcccatggaggtggtccagaaggaacctgttaagatagagctgtctcctcccatagaggtggtccagaaggagcctgttcagatggagttgtctcctcccatgggggtggttcagaaggagcctgctcagagggagccacctcctcccagagagcctccccttcacatggagccaatttccaaaaagcctcctctccgaaaagataaaaaggaaaagtctaacatgcagagtgaaagggcacggaaggagcaagtccttattgaagttggcttagtgcctgttaaagatagctggcttctaaaggaaagtgtaagcacagaggatctctcaccaccatcaccaccactgccaaaggaaaatttaagagaagaggcatcaggagaccaaaaattactcaacacaggtgaaggaaataaagaagcccctcttcagaaagtaggagcagaagaggcagatgagagcctacctggtcttgctgctaatatcaacgaatctacccatatttcatcctctggacaaaacttgaatacgccagagggtgaaactttaaatggtaaacatcagactgacagtatagtttgtgaaatgaaaatggacactgatcagaacacaagagagaatctcactggtataaattcaacagttgaagaaccagtttcaccaatgcttcccccttcagcagtagaagaacgtgaagcagtgtccaaaactgcactggcatcacctcctgctacaatggcagcaaatgagtctcaggaaattgatgaagatgaaggcatccacagccatgaaggaagtgacctaagtgacaacatgtcagagggtagtgatgattctggattgcatggggctcggccagttccacaagaatctagcagaaaaaatgcaaaggaagccttggcagtcaaagcggctaagggagattttgtttgtatcttctgtgatcgttctttcagaaagggaaaagattacagcaaacacctcaatcgccatttggttaatgtgtactatcttgaagaagcagctcaagggcaggagtaatgaaactttgaacaaggtttcagttcttagtttgtaaggtatattacattttatattcatttatgatagcagacaaccttttaagattgctttaattagtatctgatgttgatttttaagtggcattcttttccttaggactttttatgtatacctgttgattgttgtgtaaattttagtaaatctaagagagtgtactaaaccagcaggtatctgttagcttatgtgtttaattgaaattagaaggctaagatggtataacagcattttattgctttgtccagctacaacttgtcatttttttctccatgtcttatcttcctgtttcactttagtttattcttcgttttttattgagatctataaaaaattggcttacttaatagcaaattacttgaagaatttgcctgctttatataaagttagcactttaagatttttttttttagagatgagaagacatttaaattgaagaaaaattcccccagcaatagacagtctatcagtccaagtatttacttcctgagttttgatcaatattttttatttgtgtatgttaatcgtcataaaaacagtgattttggtgtgttttttattttggtgctttaatggcttaagatgttgcacattttttttttcttttggtttctgtttatgtttttttgcctatgcagttaaatttttcctagaaatagcatttgtgttgaacagtaacactttatacatatatatatgcatgtttattttgtttggcgtctttggagggatgcttttagacttgtttgcaaaagggcagttttctttttctttgctgcagttgtctattttgcagaataatagtgtgtgcaagtttgtgagcaaatgaaatatgcaggttcaatctattgattttgatttttacatcttatatctatgccagaatctgtatttcatataacttatttatttcgaatggatgtagtaaattcacagctatcagttttgattttgcaataaataaaccactaggttgcatgtcgaacaaatttttatctcaaataccaaccatcagttttttttttcatgtgttttggtacagctaattcctaattgtagagtgttaaatgtttgaggagaaccttttctcatagatggttggtgttcatatggctactttacaataaagagaactgtaagtgatatttggaaactacaaacctggaattaggagatataattattccttcaagttttatagaatatcacttgggagattccaaagccatagctattacgcggcaaacctaggataagaaaggtagtatgagtgctggtagaccagctgcaactttcctatacagtgaaaaaggctggtgaaacaagtacagtccagattttttaaaatcatactttctcagggatctccacaaactggtgggtgtcctggctgtctgtgtgatagcctctttctataggtgaggcctcaaatgaattgcagctatcctggtgttcctatgagggcactttgtatgaaaaagggcatgtactccaaaacatttttgtaggttctttggccagttgccaaagagtgtgaaagaatccaatagaggatttttcttactgatagcagtcattcattgcagtaaaataaaatatgatcccattagggaatcttgaattctgacctcccatactccgttttgaaataaccactttatatttcattttttaaaaatctgatgatctctttgaggcaggtttcagatttggcagtacaacatgaaagattaggaaaagcattaataacgtgtgggtggaaagcttgttaaaaatctgagagtgaagtttgagttaaaagttgtttgaacatggcattgactgggaggccaaagatttaaagaagcggaagattcttctcttaagacatgaggagtaagttgtgtgataatggtatgtgttttgtgtgcatgaatggacattgtaaatgttgaattctaggctccgacaatcattgtcaacagaagatcaagctgcaaatatttatgttttaaaacttaaattataaagctagttaagtctttctaatgactagttttaatgttcatgggtacattttacctaagttaccgtttacattgtatagaaaaagatacatcttaagcacagattggttattaggaattagtttggggaagaggtttttttgtggattctttcatactgcaaagaaaaaccatttgccttttggggaattgagctaacttctaatctagtcttaagactagaatgctaaaaacaaaaacatgaaggaaattaaaaccccttattattaaattgatttgtaaaaacattgttactggaaatttattggacttgaggccttcctccagaaaataaggacttgattgtcaggcctatattaggttctgaaccttaatgccatgtatttgtacttactaaaaattgtttcaatgaaaagtacattagcagtatgaacttctggtccagttggaagtttttccatttgaaaaatgtgatgtttgcatggaactgtttgaaacttttttattttctagtccccctcccccacactggatagaatttagcctagaattttccctttggataaaagaacaaaaattgaacatgttatttgtaaattgatgtttagtaattagtgataaacttgaaatactagcatatattataagccttaatcttaggtagtcttatgaaaatgaatctcttaactatcttttgaacctgtattcacattggttttcaagatattttaagttatattttttcctcttttcagagctgcttcttattctggggctacttttttttttagttgtgtaattcacaaagggctgcatttttttttttttttaataaggcttataactatggctggatcttttgctctagtcttctaagaagggccattttattttttagagtcacttctaaagtcatgtggtaattaactttggagactgttttgcgtatgagtgctgatacaaattaaaacccaagtagacctcattgcatgtcaccctatgaatgttgacaatggaaggaataccttgcctgtagtatactgtcacttctggattgataagctgaggaagaaagttaagtttcttttttacataagtcagaaaaacttacagctggtgttcctagtttcctggttgacctcagcagatgaagtgaacagatagtgttaattcagattgaagaaattatctgaatcttggtttgtgtagatttacaatctacatgcaatattaactaaatcagatagcttttacagtttcacatgtgtacataggttccctcccggtcccttccatatccattagttattgaactttctaaactggcattgaaacattacaacaatgttttgttgcaccaattttataaacttaagcagtgcaatacgtgttacttttctgaggcaaaccaaaggtaaatttctcaaggttcttgctgccttctttagcagcatttgatggaagatcttttatacatttgtaatagataaaaataaaccagattgcaaatccttttttaaaatcctaaaccatgtaccaagtttttggtccaaattatgtaggataagttaaacttaaattgcattctattaaccaatatgagtgtatttctgtaagcatagttatgttgaaataaagttttaaaaaccatga

SEQ ID NO: 101 - protein, 1097 aa, Homo sapiens
MATQVMGQSSGGGGLFTSSGNIGMALPNDMYDLHDLSKAELAAPQLIMLANVALTGEVNGSCCDYLVGEERQMAELMPVGDNNFSDSEEGEGLEESADIKGEPHGLENMELRSLELSVVEPQPVFEASGAPDIYSSNKDLPPETPGAEDKGKSSKTKPFRCKPCQYEAESEEQFVHHIRVHSAKKFFVEESAEKQAKARESGSSTAEEGDFSKGPIRCDRCGYNTNRYDHYTAHLKHHTRAGDNERVYKCIICTYTTVSEYHWRKHLRNHFPRKVYTCGKCNYFSDRKNNYVQHVRTHTGERPYKCELCPYSSSQKTHLTRHMRTHSGEKPFKCDQCSYVASNQHEVTRHARQVHNGPKPLNCPHCDYKTADRSNFKKHVELHVNPRQFNCPVCDYAASKKCNLQYHFKSKHPTCPNKTMDVSKVKLKKTKKREADLPDNITNEKTEIEQTKIKGDVAGKKNEKSVKAEKRDVSKEKKPSNNVSVIQVTTRTRKSVTEVKEMDVHTGSNSEKFSKTKKSKRKLEVDSHSLHGPVNDEESSTKKKKKVESKSKNNSQEVPKGDSKVEENKKQNTCMKKSTKKKTLKNKSSKKSSKPPQKEPVEKGSAQMDPPQMGPAPTEAVQKGPVQVEPPPPMEHAQMEGAQIRPAPDEPVQMEVVQEGPAQKELLPPVEPAQMVGAQIVLAHMELPPPMETAQTEVAQMGPAPMEPAQMEVAQVESAPMQVVQKEPVQMELSPPMEVVQKEPVQIELSPPMEVVQKEPVKIELSPPIEVVQKEPVQMELSPPMGVVQKEPAQREPPPPREPPLHMEPISKKPPLRKDKKEKSNMQSERARKEQVLIEVGLVPVKDSWLLKESVSTEDLSPPSPPLPKENLREEASGDQKLLNTGEGNKEAPLQKVGAEEADESLPGLAANINESTHISSSGQNLNTPEGETLNGKHQTDSIVCEMKMDTDQNTRENLTGINSTVEEPVSPMLPPSAVEEREAVSKTALASPPATMAANESQEIDEDEGIHSHEGSDLSDNMSEGSDDSGLHGARPVPQESSRKNAKEALAVKAAKGDFVCIFCDRSFRKGKDYSKHLNRHLVNVYYLEEAAQGQE

SEQ ID NO: 102 - protein, 2138 aa, Homo sapiens
MATQVMGQSSGGGGLFTSSGNIGMALPNDMYDLHDLSKAELAAPQLIMLANVALTGEVNGSCCDYLVGEERQMAELMPVGDNNFSDSEEGEGLEESADIKGEPHGLENMELRSLELSVVEPQPVFEASGAPDIYSSNKDLPPETPGAEDKGKSSKTKPFRCKPCQYEAESEEQFVHHIRVHSAKKFFVEESAEKQAKARESGSSTAEEGDFSKGPIRCDRCGYNTNRYDHYTAHLKHHTRAGDNERVYKCIICTYTTVSEYHWRKHLRNHFPRKVYTCGKCNYFSDRKNNYVQHVRTHTGEKPFKCDQCSYVASNQHEVTRHARQVHNGPKPLNCPHCDYKTADRSNFKKHVELHVNPRQFNCPVCDYAASKKCNLQYHFKSKHPTCPNKTMDVSKVKLKKTKKREADLPDNITNEKTEIEQTKIKGDVAGKKNEKSVKAEKRDVSKEKKPSNNVSVIQVTTRTRKSVTEVKEMDVHTGSNSEKFSKTKKSKRKLEVDSHSLHGPVNDEESSTKKKKKVESKSKNNSQEVPKGDSKVEENKKQNTCMKKSTKKKTLKNKSSKKSSKPPQKEPVEKGSAQMDPPQMGPAPTEAVQKGPVQVEPPPPMEHAQMEGAQIRPAPDEPVQMEVVQEGPAQKELLPPVEPAQMVGAQIVLAHMELPPPMETAQTEVAQMGPAPMEPAQMEVAQVESAPMQVVQKEPVQMELSPPMEVVQKEPVQIELSPPMEVVQKEPVKIELSPPIEVVQKEPVQMELSPPMGVVQKEPAQREPPPPREPPLHMEPISKKPPLRKDKKEKSNMQSERARKEQVLIEVGLVPVKDSWLLKESVSTEDLSPPSPPLPKENLREEASGDQKLLNTGEGNKEAPLQKVGAEEADESLPGLAANINESTHISSSGQNLNTPEGETLNGKHQTDSIVCEMKMDTDQNTRENLTGINSTVEEPVSPMLPPSAVEEREAVSKTALASPPATMAANESQEIDEDEGIHSHEGSDLSDNMSEGSDDSMATQVMGQSSGGGGLFTSSGNIGMALPNDMYDLHDLSKAELAAPQLIMLANVALTGEVNGSCCDYLVGEERQMAELMPVGDNNFSDSEEGEGLEESADIKGEPHGLENMELRSLELSVVEPQPVFEASGAPDIYSSNKDLPPETPGAEDKGKSSKTKPFRCKPCQYEAESEEQFVHHIRVHSAKKFFVEESAEKQAKARESGSSTAEEGDFSKGPIRCDRCGYNTNRYDHYTAHLKHHTRAGDNERVYKCIICTYTTVSEYHWRKHLRNHFPRKVYTCGKCNYFSDRKNNYVQHVRTHTGEKPFKCDQCSYVASNQHEVTRHARQVHNGPKPLNCPHCDYKTADRSNFKKHVELHVNPRQFNCPVCDYAASKKCNLQYHFKSKHPTCPNKTMDVSKVKLKKTKKREADLPDNITNEKTEIEQTKIKGDVAGKKNEKSVKAEKRDVSKEKKPSNNVSVIQVTTRTRKSVTEVKEMDVHTGSNSEKFSKTKKSKRKLEVDSHSLHGPVNDEESSTKKKKKVESKSKNNSQEVPKGDSKVEENKKQNTCMKKSTKKKTLKNKSSKKSSKPPQKEPVEKGSAQMDPPQMGPAPTEAVQKGPVQVEPPPPMEHAQMEGAQIRPAPDEPVQMEVVQEGPAQKELLPPVEPAQMVGAQIVLAHMELPPPMETAQTEVAQMGPAPMEPAQMEVAQVESAPMQVVQKEPVQMELSPPMEVVQKEPVQIELSPPMEVVQKEPVKIELSPPIEVVQKEPVQMELSPPMGVVQKEPAQREPPPPREPPLHMEPISKKPPLRKDKKEKSNMQSERARKEQVLIEVGLVPVKDSWLLKESVSTEDLSPPSPPLPKENLREEASGDQKLLNTGEGNKEAPLQKVGAEEADESLPGLAANINESTHISSSGQNLNTPEGETLNGKHQTDSIVCEMKMDTDQNTRENLTGINSTVEEPVSPMLPPSAVEEREAVSKTALASPPATMAANESQEIDEDEGIHSHEGSDLSDNMSEGSDDSGLHGARPVPQESSRKNAKEALAVKAAKGDFVCIFCDRSFRKGKDYSKHLNRHLVNVYYLEEAAQGQEGLHGARPVPQESSRKNAKEALAVKAAKGDFVCIFCDRSFRKGKDYSKHLNRHLVNVYYLEEAAQGQE

SEQ ID NO: 103 - DNA, 143147 bp, Homo sapiens
aaagggggaaaagaaagtgcggcggaaagtaagaggctcactggggaagactgccgggatccaggtctccggggtccgctttggccagaggcgcggaaggaagcagtgcccggcgacactgcacccatcccggctgcttttgctgcgccctctcagcttcccaagaaaggtgagtctcgcgccgccgtgagggctcagaagtcaccaagccgcagaatctcagggtagacggattcttagagatcctatcgttaaaccctcctactttacagaagaggaaactgaggcacagaacgaggcagcggctgggataggtcatactgctagttaggactggagcccggattcgaacccaaacgttcagagacccatctttgctttgcagggatttaagtaacgcggttgtgggacgtctgctcgttgccgcccccatcctcagccctttgaggggtctacccttgttttcctcctcaccgccccctccccgctaccaccccccgcccccatctcctccttggtttctccagaccgctgctggaagcgccgaggacagaaggaagcggtgtgtcccagcacgcccactcggtatcacgtcgctctcagcgcagagctgtgacagcctgggaaaatgctgcttgcagcctcactccctcttcccctgacctgctttctcagaaagatgccccttcagagggtgtcggaccagcttctggaggagcgcggggagagaggagcgaggcccgggcgccagtgacctcctatggtactgtttcttcccagccccggaggaagcggagctagtggccctgtggggcacagggtgcccctcacttgggaagagctgacttcatggaaccatagagccccttccctcttctaaatactgagagggagcaaggaagctgagttaaagagaaaatcacaaacataaaagcaaacttcggctgtttcctttaagagctagcccacagcctgtcttccctccaccttctggttgtgaaattgtgaaccagggcgccacgcgaagcattctgctgctctgctgtacagatccctggtttagctactggatgagaaagaggacttgagttttgactccagctcttccatgtattagcagtgtgaacttgggcaagttatctcacctttccgatactgggtttttcttttctttctttcttccttttttttttttccagccaaaaaatggagatttataatggtcacaatgagccctttgggtagttggaaggatgaaatgggatcattcaagtagcatgtttagcacagtgcctggcctggcatctggttggttcaaaaccaatggcaactattgtaaatattgttacatagtaaccttgcagacagtgggttttcagaaaggtgatttcataccatcttacagaggcattttaaaaaaatctgtaaatgtggtgtctttcttcttttgaatttgagcaactcttttataataagaattttctgaatgttgtccatatgtgatgtggatcatggatgcttagctcgaaatgtaaaattgatgtttctcggtgatatgaatttcctactagtttttaggtcaaacctcaggcctgtgaactgccctgatctgagacatcctttattgacaaagagggtcttgaaatgggtgagaggcagaaagacaagaagacaaagttggaagttgcagctgtgttacagattattctaagccttctatccttgctctcttaggtcagtcgagcaaccttacatttttcatctagtatcagaaaacaaacaaaattctcatatatttcttttggattgtacagagatgctgctaaatgcaaacctttctggacacaaacttgccttatttaaacacgaacacacagacattcacatgcccacactagtcttcctgtattattggtattttaaagttaaatggattccctcccacacccttaacccttctcatgacaattgattttattctgatgaacttcatgcaataatttactactatctactggctttgccatgcgtccttaaattgagtgtccagcatttgtagttggctgcctccttcacaggccatagcatttgtatgcagtattggtaagtgcttgagaacagagtgtgatacatcttgatggaagataagagcccagtggtgcccacttaagtacctcccgcaccaagcattagtaaaggatgggatcacctgcttctatcagcttgttccatgtacatgcattgtggtgagctggctgggatatgactgaatgtgtgcctgagagacaggggccttgtgggggaaaaggaaaatgttcaaaataaggtcagatcatgaggatggaagggagattaaaagctaattcctttggttctgattcttcaaagaaaggttggtcaattatacccatatcttcatacagattattacttgttaccaaaaccatatatatgtatagaactttaaaatttccaaagtgcattctgtatatatgatactccttgttactcacaatagccctgggaggacatggcaagaatattaatagaggaaggagcccaggttttgtggtcagacctacttgatttcaaattccagctctcatgcctgagtagttgggtgatattgagcagtttatttaatcatttgaagtttctgttttatccagttctaaaatggaaaaaaaaaatgcttactttaaaaatctgtataacgaataaattcaatagaataatgtcaagtacatgtagtgaataggtgctcattaaatgatatctcttcttagctagtctcaatttatttagaacataactggaatgagactcagagaaatgaaaagttgctagaggtcatgtgttagtatgtttcaactctgggaatacagttcacaccttttcatgtctagtttagggcatttcccatcacactctgtttcctcgccaatgagatatttaacaatttacttcagttataaagttgaccttatttgtctggttatttcaggatatcctttttgttgaaaagcaggtattttcttgcaaagagaacaatccttaagcacagttctgtagagtttagtggagccaactgtcataagagggtatttaaagcaatggtctctaagacaaccttcctactctcctgtgttggatgtaatacacctttgattcctaagagaaagggtactaactaagaagacataaagtacagaattatatcactcttttcttcctgttgtgagtggtttcttccctctgccatcctcatgctagttcaaaggctgggaagaagattgaacaacaaatgttatgagtgtccatggcattattcaacttttttttttgacaattttgtgggtactgagtagagtagacagaataatgtgcaaaggtggcatttgcagaaagagaccactgcttcctggtggtgctgattacttgtctggagtttcactcctccttgtggaaagtgatggctggaggctcatgttggaagatgaagggatctgtttctggcccaggcagtggggctgttcatctgctgagacttctcataggccattagatttctcttctttgtagcaagcacacaggcttgcaaacgcagatgtagaaggaacattttgctccttgcttttggcattttggagcatatgtttgctcctataggtaagcagttagcatcatcttacctggcacggttaggaaagcagaatgtggcttgaggaaatcagaggacgtagaaaaaaacaaagattatctccagcctatacacagcttcatttgttgctcaacttcatcaggcttttgctggtgacacagatgtaggatctggtgagtcactgttgccttgcccatgaaatattaaagagagccacctactgtgctctttgcccattttggaaattgttctgcatggaaaaaaaagaagaagaaaagaaaaaagaaacaccaaagaataggaaggttacagaacatttggtaagtgatatttcggtggataaattcaggttagccattcatttgctgccttttttttttttttaaatgataatgcatggtttacactgatagggttgttaggagacatccctttggtctgactttattctaactctctgtagcagctgtggtagtgtggattttgagagtctggctgaaatctgaggcaagttattctatagagatgatcttttggctctgcagctaggaaatagggacactgatgcctgcttagaagcttaagtccctatttatttcaacatcttattcatagaaaacatttaataaacactgattctgtcctctgctaacaactccttcaatgtattagtctgttaaattacgatcatcataatttaacaggtactctttacttgtctccatcattatttgtgctgagtatcttaaatatatcatctcattcaatcctcacaataatcctgtatatttttttaggaaaccgaggctcatagagttacgtagcatggcctatgtattagtctgtgttcatgctgctgataaagacagacccaagactgggcagtttgcaaaagaaagaggttcattggacttatagttccacatggctggggaggcctgacaatcatggcggaagtcaaggaggagcaagtcacatcttacgtggatggcagcaggccaaaaaagagaacttgtgcagagaaactctcattttgaaaactatctgatcttgtgagacccattcactatcacgagaatagcatgggacagacctaccccacatgattcaatcatctcccactgggtccctcccacaacatgtgggaattatgggagctacaagatgagatttgggtggggacacagagccaaaccatatcagcctgtgtaacagcacaaagcaagacatgatgctgagactcatctacgcattttattctagagttaggaagaacttccaattgtcccacctctggactagaactgaggacttagactaagaccaatgacctacccaatcatcatcctacatcctcatcccggtactaccttgcctgtgactgagaaatatctttacctttggacctaaaatgtgggagagctgaactagatgatctctaaatttcttctgctataacgcattgtgtatctttaagattcctttcaactttgagattctgtaatcacatctatttgcaaaagttaaagctaaaatggagaaaggggagtaaaaagaaaatactcttattgttttattccctggagatgtatttttctgaacaaacaaagatgagcaagagaaatcagcatttcatcggcacatgtacttttgtcatttcatttaaacataaaaataactctcagatatatattattatttgccttttacaaatgaaagaactgaggctcagagagacttatagacttgcccaaggtttcctaattagtaaagattggaacctgcgtgtgcctgagtgcaaagccttttggtccactacagcatatttactagataccacaccatgaaatttggaaactcatataaccagattcgtaaatgccccatctctgtatcctcacatcacactacctcagcttctgtcttctcctcttcttctactctttcctttccaaacatactgctccaatcctttcttgattctctccagctcacaaaaccccttttaaatgcatataacatcttctatctctattgttattattattattttttttactgtggtcctggaatttgtaatttgtgcttttgtttttgttcatccccattgggcacaggacagaataagctatgccatcagctgagagacttacaaatgtctctatctaatctgtgtgtcaatcatctttctatctagctctatttattagtgaaattaaagaaagatagagcatattaagcccctggctcttaatagttggcacctagaagggacttggtaaatattcattccttcctcatcattcagcactgctgtttacccaaatcattactcatttaatgaatctcagatggagagggggagtatattgagtagatgccccagctggtctaagagaatgtgccacagtttggcaagcaattgggatggtaaaggataggaaatgaatgtgatatttaccttaaaatatctgctgaggatatggtttattctgccctgtgcctagcacagtgactcatacataagaagggcaaaattgaacggatgatgggttcatattatgtcagtgggcccaaaattgactttctggatttctcgtgctttatcaatagtattagttgtgtcaaagtttgcctctacagactaataaagtagttttaatttcctttaattttgtggtcacaaaatcagacaatgataaggagtcataggctccaagaaagttagacattactagctcaatgatgggaaaacccatttctgtcctaataataaagggcattttgcagaaaacacggtgaaggatgatgctgaagtgcccgtttgcatatattgacagcaagaccagtgtcaagtatcataaataaattgccagagagaaagtaggaagtttccattgaagtgggcagctgcaatgagcttcgatctcaagatttctaaaagcattgaagaatttacatcacttcaactattattttctgttgaacatgagaacaggtaaccttttatgtctagtttatatccagcagatgcttgtgatttctacctttctggcacaaaagtcctcatgattacacggcttcctcctctgccaatcaatgctaatggcaagagaaatgagaagcagtcattttataagcattatgtctggaaatgttcctttcgttgatagcagtttcttaacgccagtatggttagatgctatggcaacttaaaattgtgtttccataatatagtggacattgatgtcaaactgatctgcctgggtttgactttggccgaattatttggtctatctttgccttatttttatgatctgtaaaatggggataataaaacccatcttgtcaggcctttggtaagtgtcaatcatatgccatgacatttgtcaagaggcttatgcatagggattttaacctctattacaattaacaacagcaatgagaattgttccattgcatgcccagatggatactaaattagaaaaagaaagatccaggttgaaataataacagcttttttttaatatagaactttaagtcgtcaaaatgcttgttattgtatatgcaaatgtatacacatgtaacattttttttttgcaataattctgaggtaatcagggcaggtgttgctaatgttttacatcatgagtctcaaaggggctacatatttactacagccaagcagctaataaatagtagaactgggacttggaccctagttttctaactccaagattatgtcattttttttttttttcctcagtcaatcagccctggtcctggttagttgcgtttccttctccagactccttgctttcaccccgaaaatgagcaatttggaaaatattatgtctaaggtagagtgttttataaatctgtgactgtagaacaatgtcttaggaggtatctcattggcctcggtgagaattacaaccgggtactgcacggagagtcagatccataaagaaccctttatgtccttaaggatgtgattctgccacattactctgacctacagatcattccccatctgccccatccccttcaggacccaggtttggggatgggaagaaaaagtagatgactcggttaggcacatggacatttaatatttgggaaatgataatagagcctttcttaaaaaaaaagcaagttctgtatcaccgttaatctccatagttttctacaacaaaataaaggagaaaatattttgctttagtttggattctagcgttgagtacacattttctgctttcttcttttgagctcttagtgcccacagaagaggcttgactctcattaaaatgtgagttctttctgtttatagaaatgatggagacttgagaatggtaatacacactaagtagcacttttctggaagattatacttcagtttcccaattacagagtgagacagtggtgggggcagcagattgaatgaatagagtagatcgtaagaagtaggctgagcttcggaatcaggctgggtttgaattctagatactgcatgcctagcctgtccagacttagttttctcacctgtaaaatggtaataaacatgcctgccttcctttgcttccttccttccttccttccttccttccttccttccttccttccttccttcctccctccctcccttcgttcctcttccttccttcctattatctatgtatctttctatgtatctatctatgtatctatgtatctatctatctatctatctatctatctatctatctatctatctctatttattaataaggttcaagtaagaaaaaatatattaagcctctagcttttaatagctggcacctagaaggcactcagtaaatattcattccttcctcttcattcagtgctgctgtttacccaaagcctctctcatttgatgaatctcagatggagagggggagtatatcaagtagatgccccagctggtctaagaatgtgccacaatttggcaaacaattgggatggcaaaggataggaaatgaatgtaatatttaccttaaaatatctcagaatctttcatgtgtaggaggaattagaccagtgataaattgcagtgcatggatctttcacaacagaatcatgtggataccttctgaaatgagcagatatctaggatatctgcactgaaatctaagaatcactggattagaattttcagtactcagaggcaggatattgtaggggtttgaatttggattcaaattctgctccctcagtgtaaacctaaggaagttatttaacttttctatgttactcattgggttgtggggagaagtaagtaatttgatacatatgaagtgcctaaaacacagttttacttactgtataagccagtctttgaaataccttgcatgactttgtttaacttacattttatttcctctctaactaaatgtcctagataactacttggctaactctttcatttgcttaaagtctttttcaatatctcctcagggaagcctacttggattgcttgaatttgcatgggttggggtaggggaagcaggaatagggctgcttgctctctgaaatcctgatctcccttaccctactcttatttttcctttattctgtggcatttggtaccttataagcttacacatactattttattattttatttagtctatttttaaaatttaacttttattttaaattcaggggtacatgtgcaggtttgttacataggtaaccttgtgtcgtggggatttgttatacagattatttcattgcccaggtattaagcctagcacccattagtaatttttcctgattctctccctcctcccacctatcaccctccaatgggccccagtgtgtgttgttttcctttatgtgttcatgtgttctcatttagctcccaattctaagtgagaacatgcaggattaggttttctgttcctctcttagtttgctaaggataatggtccccagctctatccatgtttcggtaaaggacataatctcattcctttttatggctgcatagtattccacggtgtatatgtaccatattttctttatccagtgtaccaatgacgggcatttaggttgatttcatgtctttgctattgtgaatagtgctcagtgaacatacacatgcatatgtctttataatagaataatttatattcctttgggtgtatacccagtaatgagattgctgggttgagtggtatttctttttgtaggtctttgaggaattgccacactgtcttccacaatggttgaactgatttgtactcccagcaacagtgtatagtgttcctttttctctgcaaccttgccagcatctgttattttctgactttttaatagtagccattctgactggtgtgagatggtatctcgttgtagttttgatttgaatttctctaatgattagtgatgttttattcatatgcttgctggtttcatgtatgtctttggaaagggtctgttcatgtcctttgctcattttttctaaataggttgttttttcttgtaaatttgtttaggttccttctagatgctggatattagacctttgtcagaagcatagtttgcaaaatttttctcccattctgtaggttttctctttgctctgttgatcatttcttttgttgtgcacaagctctttaattagatcctatttgtcaatatttgcttttgttgcaactgcttttcgtgtcttcattatgaaaaatctttgcccattcctatgtccagaatggcactgcctaggttgtcttccagggttttaagtctttaatccatcctgagttaatttttacgtatgatgtaaggaaggggttcaatttcaatcttcttcatatggctagccagttaccccagcattatttattgaataggaaatcctttcctcatttcttattttttatttcacctccagtagattataaagtccacaaggacagggacacttgatttgcttattgctgtatcccaagtgcctagaatagtttctagcaaatagcaaatggccaataaggaggcaatgatacataaataagtatatggatagatgttagtgtgattatttgtccccaagaagtagaaagagatagaaccggataagacagtaaattatacatgtaatattcaaataaaatttgacatacatatatgcgcatatacacacatatatatacacatttacacacatacatatacatatgtatatataagtgtatgtgtgtatttttggagtgttgagtatatatttaaatattgaagtaataatttatgtctatgtacatatatatatgtgtgtacatgtatatatgtgtatgtaaaaataagtgtctatttatctatatatttaggagtttttcaaagctacctgaggaaacagaggtgttgaagtgtttacttgttaggttgctatagtgataggaagaaagatgaaaatatgtacatatgagtcaagagacaacagacaaacagaagaaatagaagtgatttcaggacaagaaatgaaaggctaagattaaaacagcaaccaacattggagggacatagaagagggacagtttttaagtagactagtcagagaagtgatctccgagaaactgacatttgaactaagacaaaagcctgagaaggacccacgataggcctgaggtcgtcactgaggtggtgggccaagtaagagacagtgaagagctggaaataaggttctaagataggcaaggcctaggtcagactggtcttgcaggctatggtgaggagtttggattttacgcaaagtgtagcaggaagtcactgaacagacagaagcaggatgatgagcaggtcaaaggtgtttagagccttgaacagagagtgaaggaaaatggaagaacttatttataagatgagaagaccaactgctctgatttcatcatgtaggctgttatgaacagatgagaaagacaatttggtttcattgatgtttcattcataggctctcgttcccattagaacatttcaaaagggaaaacaaaaacccagctaaaatagggaaaacctatatattctagatgtggctttgctttttctcaaatgataccattcttatttccaaatgcattaagtaatggatggaaatgtatgcactattgctcaattcaattcagctggaaattttacagttcttgtgtaggtgttttatgtaatcaattccccaaaacactgaacctagagctatttccttaggaaactttagctaccagtttctgaaatctgtcgtagtgaagagtaagcatgtgaaaggcaaattaaattccatacaagatcaatttcttctttctgactctacaaatttaaatggtacctaactcttgaagaagtagcttacaggtcatctcttccgtgatgtgtttactgggcccgtgcacatataatctcatacatgcctcttcataatatgagtttaaaatagcttgataacatatgccagactccatttcaaattttctataaataatttctttttgaagtctcggaataaccgtatgtggcaggtgaagttataatcaccattttacacaagacaaaactgagacccggaatcacagagttgatcagtggtagtgtcaatattggaaattgagcaagcttaatcattatactattctgctctttgattgtaaaaagtaaacctgcacatttattcacctctatttgtcccacttactttgtggtgccttatatgaaggaatagttcaataagcgtattgaatcagtgaattaatctgtgacctattctttcaagttgtatcatttcattagcaaatagtgataaaaacgtgggttttagactgaggcaacctaggtagcagaaggtactcactacctctgtgatatggtaaaattactaacatctctaaacctctttcttcatctatgttgttggcacaaatgtagggccattgtgaggattacatgaagtgtgcatgtaaagcacttagcacagttcctggaacataattagagctgagtctatctgaactgtttttattattttttgaactaaaataacctcctcaaacatgattacaattatgtaccaggcagttttttagttgtgcttgttttattaactttcttttaaaaatcaaagccaaagattcaatcatataatcagtgatgttaattttgttccagggctcatcctggcatcctgccctcagcagggcatgcagtgtggattctgaaaggccctcttataggaaggaaggccagttctggagaacagcatgagagcaaaaggtgctgtgtgaccacgcttttttcctccatacatctgacatagctaaaggcagcacttccaaccttgcctgtctatctccctagcctggatctaccttgctggaaagttactttgtattccagcgatgatcccagagcattttgggtgacaaggaaaaaacagcagaagactaaagttttgccccagataacacttaatgaggttaatttacagaacttgctggaggtttaggacctaatattgatcctgtgcctcttgtgtaccaggagctgtgctgaatgtcttagtttcattatctcattcaatccttactgcagccatgtacaaattttagtcgtaaaccaaatttacaactaaaaaataaaaataaaaagtgacatgcttgacatgcttgcctctacgtgtgttttgcagggctgtggtgataaaatcaaatatttcttgtgttttgccacatttttctttgaaagcaaattttgcagcgttgcaacacctctggagtctccagggacctcccctgcagtgaagacacatttggcagagaaatgaggcaaaggttgcatgtggaaggcaggaagtttcattccagttgacagtttactttgacctggaagaagctggtaccaatgagctgagttctattttgtggattacatttgtttgcttctttgtagggaaccaatatggtgcttgtttacatttttttttttttttttttgcttttggtcttgttatgggatgtttaaaaggtgtaacttttatccttctacattttccaagtaaagttcagatgtttcgatattcctgacactatttgataaattattttaaggaaaggtctacacacacacacacacacacacacacacacacacacacacacacgagaatggtgcctgattcataattggcactcactatatatttgctgaatgaatacataagaaaataaatgcatttcctttttcatctttctctctctgagaatgggaactgctgcaggatttttttaaatggcaagtttcaatatatacctttcttcttaaatgtttgctttaagaataatttcagaaggagattattctaaaatatggagcattacttaatcttagttatgcagcacagctaattggagtggactgtaattcctttggaatttattgaggtgagatcatttacttgtatactaaatggtcccagactgatatactgttaaatttgtgtagtctgattttcataaatttgctggcctttctctctcttattgtctgctaattctcattgcttttggcatgtctggctctccattccccatacaattaacagtttctactttactgcagactaggaagctgggtaatgaatttgttggaccgggcatataataagaatacatagctttgaatgtggactagagagactcttttccaaggtaaggaagttaaaagttatggctgctatagaaacagtcttcatataaggtgataccacacatagtaacactgggtttcagttgcctgcgttaataaaaagggaggcttggtagggataattcatttactcttttggacaataagcattttctgagaaacttctgtaggcaagacactggtgagatatagagaattaaaaaagcaaatacacaaacacaactgaaagataaaacatacacaggggtttataatacaatttatacagtatttcaaatagcatgagaatacataatgtactttgaaaagatatataaggtaataaaacatttttgtatttcagaggaaagacaattgtgtaactcaggaagggctttataaggaagttgtatttaaagtgagtcttgaagtgatggacaggttggacagagagagattggtaaggagaagtggtaaatgaattatggtctgaccggggtgagtgaatgatatggattgtgcgatttatcagagagagctacaattgtgggagagactgggcaactgaaggcctagggcaggatatttgggagatgagagaacagttaagaaatcctgagaaggcactggttaggaagtctgttgagggctgttgcctctgcctgtggcaggcagacagtcagaaatgaaatctggatgtgacgtggaaaaggacagattggagcccctgagtctctagtttgatgatataggtgttctgcagaagagattggtgctcttagccacggaatttcacatctgcctggcttcagacggaggagtttaaagggaagatctggcaggaattgaaagagcagtgggcagccaggcgcagtggctcagcctgtaatccccgcactttgggagggccgaggcaggtggatcatgaagtcaggagttcgagaccagcctggtcaagagaccagcctggccaacgtggtgaaaccccttctctactaaaaatacaaaaatggccgggcgtggtggctcatgcctgtaatcccagcactttgggaggccgaggcgggcagatcacgaggtcaagagatcaagaccatctggccaacatggtgaaaccccatctctactaaaaatacaaaaattagctgggtgtggtgacgcacgcctgtactcccagctccttgggaggctgaggcaggagaatcacttgaacccgggaggcggaggttgcagtgagccgagatcgcgccactgcactccagcctggcgacagagctagactgtctcaaaagaaaaaaaaaaaaaaaaatttagccgggcgtggtggcagtcacctgtaatcccagctactcgggaggctgaggcaggagaattgcttgaatccgggaggcggaggttgcagtgagccgaagatcacagcgccactgcactccagagtgggcaacagagcgagactctgactcaaaaaaaaaaaaaaaaagaaaagaaaaagaaagagcagtgggcctggctgctgccccatctaggaggtgagccagtgatcagcaacaacgtatgtgagttgcagtactacctagaggcctagacagaccctctgaataaagttctctatgggcagccctaacttggaaccataaagagtaaggaattctaggaaacatcattccagtttaactatttttgcacagttaggaaacagaagtgacttttatcttagagaaagggaagataatgaaaacataaagtgaaggagggaaacaggaacctgccctggagagagcccagtctgaccgggagataatatgtgaatacatcatcattgaatgcaaggaggcactattttttggggaccttaaatgctctgttaagaaattcatacttaatcctataagacatggagacacaatgaatattctcgagtaagggaggggcattatcagatctgtattttagatctggcttagagagggaataagtggggcaattaatgaggattctattataataatcaaggtggaaaatttgcattcccagaactttcttctgttctcactaaaggaggtgacccagagtcatcataagatgttctggaccattctgggaattaaaaatgctagtgtacattacaagccaaagtgatttcacctatggctgctattgtcaactccgatgcccttatggtatgcctagataactcttcttaaaaactccctgataagtttgcttctagtaggtgaagaacaaggagaagtgtatacacaattagaacatcggcttaaatgaaattggcttatgcaatcatgtcagtatcattttgagaggagagatcctataaaaacaaatacttattacgtagtaaattaagactttggggctttactgagtggtaacaacagtattctcttatgtgtatccaagtgcccaacaagttacagaccacttacatgttcattatctcatttgatttgataacagctctgcaaggtcagttttatctgaattattacaagtgaaaaaactgaagctcagaggttgtgatgaccatcaagtggccacttagccccgatgattcaagagctcattggtgttctatatattcaaagggcaccattctattgctcaactttccatttcgctctatgcaccactgcctgataatcttgggacatatctttgttcatgctgtgtccttgttctaaatccattcatcgctgggccctgttgctcacacctgcgatcttagcactttggggaactgaggtgggagggtcccttgagcctggaagtttgaggttacagtgagtctggactgtgccaccgtactctagcctgagcaacagagcaagaacctgtctgtaacaataataataataattaaaaaaaatccacccatagttcttggacattctcactttaaagatctctttccacccaaagaacaggctttttgtaacccaggtgttacaatttcagctgttctgtttcctcactttcctgaagtatttttactgcctttcctcaaagcacaggacaccaaacacagggtaaagaggaaagggttctttacaaaagcatacctgagtggataccttaacaccctcaggaaatctacacatctttgaattagggcattccataagtcttccctgtcagcacttcccggcacatactcctgaatgtttaaaaaccaaccatatctcttggcttcctacttgtcaagacacagctgaacttactcacttgtcttgacttatgtaaaacacacacttacagtcagtgctgtatcacctaagacttcaacagccagcagcaagtgaattaagaaaccgtaatatatcctccattcaatgcacccttgcagggttttgcacccctaaagagatccctagggcacatgaaatcgggtgactaccccagcttcttgctgtggggaatctagggtttttgtagttaatgatattgagacatggacttaggggaacaggaggaggcatatagaaatcaagctttcgcagcagccattaaatggaatacgtgtaatcgttctcaaagaatactagattgctggggccaaagaggctaaacctctggctttgcagaaaggcctcagaggaatatgttgtgtttataaagtcagccaaacctacctgtaactggctttctagttctggcatagtgcactttctggtatcatgctgcttctcttgtcttggttctcacacatgagttttggcctaattgctctagtttgagagagtcaaaggcaagtcttctagtaatgaggggaaaaaaggataatagctaacaagttgaagtgcttactgtgtgccaggtgctttacaaaattacctcatataatcatctttctttttttttttttttttttgagatggagccttgctctgtcgcccaggctggagtgcagtggcaccatctcggctcactgcaagcttcgcctcctgggttcacgccattctcctgcctcagcctcccgagtagctgggactacaggtgcccgccaccacgccctgctaattttttgtatttttagtagagacggggtttcaccgtgttagccaggatgttctcgatctcctgacctcgtgatctgcccgcctcggcctcccaaagtgctgggataatcatcttgtctaattccatgtgaggtgctttactgaccctgtccaccaataaggaaattgagagtcaatgtggttaagtagcttgtacagctgtggagaaggacctgaacccaggtctatatggctgtaaagctcatgatgaaaccccgtgctttgcctccctgtgctgaggcgtgccgtgcatcccatggcccctatccagtttgcttgcacgtacagctgaacatcttataacaggcgtttagttagtactctgatgtgtctgacagttccctagaagctcagcttggactgagccagcccatttgcgtttctggcctcttcttgcttccttttctcctttttcaatttcctttttcggctcaggcagcatgggagatgccttaatcaattgatgatagttccttctgttttaatgacattctcatttcctcagtatgtttttctcactttgagggttggagaggggagtaagggaacaaatactttcaaaaacccctagtctcctagttttgaaagtaagttccatgacgttatggaaatgctgctttgaaatactggaactgctgtattgaatgcccataggtgtctgtgaaagagggaaccgtaggcccaacatggctcgaaagacttcatccaggataagtaggttgacatgacaagggatttgggtccagctcaacataaagagacatttattacaattagggccatatgaaaactacattagtaatgagttcaccatcactagagatattaaaagagggcctagacatctagttggcaaggatgtcacagggagatttgaatattggaaaaaggagtttgaatcaaaatgacatttaaaggcctttccggccttgagattctgtcttgaattcacttagaaactttatattgggaataaaggtttccccttgttataattaacaccaactagtgatgtctcctcctccctcccccctgtgcttcccctgtctgaacaactactcgatttaagaaggggacttaggatgaggaaggatgtggttccttcccacttggcagcactccgtgtcagaatggaagacttgtgtctgggcctggcacggttccgtcaggccctcttaccagcccagtcgtgtctgtgaccagagcacgtgggaggtgcacatccgtgtagaaaaacctcccactggctgccagctctggatttttgaaataattcctaatgaatgcagtcttgcccaggccaaacctcttacaggaatgatgacacaccctgaaacaagtccgagtcaggccagacaagcatcccctgaaaaatactccctttgcggttggcagcatatgagaaagtatctttgagagccgtttcttcttgccgtttcaaaggaaagctgcttgcaggccaggaggtcaggagtgaaaaactcctttttttttttcttctattttttcttttcttttaattggcttactactcatctgaaagctctgctagtcaaatatgataatcctttgatttaatgtcaggattgagacagttctctggttcttgaaggaaagagtgttgcaatgctaggaagtctccagcagctgattaacagctttgatttgaaagaataaaaagaaagatacaaaaactggcagtgggtcctaccgatcggtgctgcaactaagaatggacagtatttaaataagatgatctttcccctcaggatttacagagacttccataatctccagcccacttcattttttttttttaatgtaatgttacagctcggtatgctttgctcaaatctatcatgtttggatatttcaaactaggaagtttcattccttgtagaaaagcttcagaaactcaccagatattttaagtcaggtcagtccagctcttcccaggaaataaagatgttaagaacttcatagctgtagggactccttagagatccgatccagtgctgcctataggaccttgggccgagatttcccatgtacaccataaatcttcacaaagtcgtgggaaaagaacagcaacttcagctccttttgcagcctgatcattgcttctgggcccgagtagctgtcttcttttgatataggaccattgcctgttcagacatgactctttttcctggatacaaatggtatgttatttttagggggcagttatatttcttaatagttttcagagttggtagacaggcctgaactgggaatcaaaagccatcttctcacatttccactagtgagttattgacctcatgaaagtcacctctcctccctgggcctttacttcccaaatagtgttccaaataacattagtgacttctgaggtcctgtctaattttctagatgtcatccggataagaagataaagtgtaagagaattaaaaaaaaaaaaaaaaaaaaagaaaaccagcaaagtgaagtgtggggcttaggaaaatgagagtcctctgtttaaaatatgtctcagagagccttggtagcaacaaaggtcccaaatataggaatcttagtctgtactgtgtattgcagggtatatggatttcctgtatttgcctaagttctatttgctaagagctgactagaaacatgaatagtagtcctgaggaagcttaaagatgctatcacattcagtttactcatttgacatatcaaccctgcggcctttgttctggaggtacactgaaacttgaactcaagtctcctgcctgcttgtgcaatgtgctttcaagtacactgcctattcagtttatttagcagtgatgaacgcttacagaaaccatcaagctatgttttgaaagttagttgattcaaaacaatagagtttagtggtcagccaaacagaagcaaggagatttgctagttttgcatatgtgtgtgacttagtttccctattatccacgtgttaaacataagttctttgtacagctctattcctggccaacaattagtgctattttttttctctcgggttttagaagatctacctcctccaaacaacagcaattaactacgacttataactcactctcagctccccaccagggccacttacattcacatttctgatcacaatatttcttaaggtaaatcttcagttctctgagaatgctgaacaatgagtgtcttctagctcaagttacagtttgtaatgaccaattttgtaattgtggaacagccacaaacacggtggcataagattcatgtatcctggcttaatagctcagattatttccaaaaacccactgacgttggatcaatcatgctacctttgtccttttgtttttctgtctattaagtgctgtgtttggcccagtcttcctcaggtctcctatggtcaaggatcgtgttttaactgttttgataggttgtctttctcaggtgtattccatgctacactgctatcatatagcaaagatcctgagaaattatactttcatgaacaattcagggctgtgattttgaacatgaattatttttcactgtgcataatgatgttcccagaacctattgaaatacgtaagactctaacgtgaaatggccccagacccccatattaccagtttttgcttgttgggtttcttttcttgttgggtgttagtagctcaactttcacacctgccatcaacatgcctccttataaaagccatttgtccttcatgcaagtttgtgacttcttctctgcctaggcataaggactcagataaccaagttgttatctgaagatctgtactataaataaagttgattctttttttaatttttttttaagttgatgcatcttagttaccgtttgcagctctggtttgtctagctgttggctactggtatttacttgataattgacactgtctagtaattgagttaccagctgttgaggtatgactgcatgcctctgattctgtgggtctcacttttctcttctttggatgttttcactggccaatagattcgttttgtatttttactgtgatcttctgggtagatgctagggaccctaatgatttttaagtaatcctgaagaaaattaccgtaagcctaaaggtggttgaaaatgacagttttttgcaaataatcaaaatgccatccatagggacatggttaaatacactatcataagctagacaatgtaatcatatttagccattaaaaatgatgtataatagatcataatgctacataagtgtgaattagggtgacaaccatggtctatgctttgcctaataaagtataatttaaaaaacaaacagacaaaaagaaatgtaattacataagctaatctggaaaaaatgtgaaagacacattactaaataaaataagcatcttttatatacacatatgattcaatttttgtaaaaagaaaaacagttatatgtgaaaaaatgaaagagtctgagtctagtagttatatatggttatattaagagagagactggatgaatgccaaagggagaggagaaggggccacagtgtttacacttcctacctaatatagatattttttttaacttttagacatttacttatttaaaaaattaacttggaacctcttactaagtgagactcgtagcctatctcaaagagcgataatgtgatatttaaagattttgctgatttggacagaaacagaaacaagaagtgatagagaatttattagatgctttactttagatacattttctcttctttttttttattattaataatgttggcagggaggcagtgaacttgcccattagagtttggcaacctgcttgagtttcctaggcatcccatgagtcctctctgtttcttgccacacagcattgactcagatctattcctttacatgcaggcagctgtacgaaaacctatgcactcttatagcctcatctggtttcctttgtcaagatattacattatgaaacattttgggaaattagcagcttttgacagtaaatacgaatgatttgtgattccactaagccactgcttaattttaggctgctgaatggtgaacactttaaggagcgtgggaacaggccatattttgttttgatcttacacagtctcatttgaaggaaggttatccatttgaagatgggctataatttacagaaaggcaattatattgaagactaataatgagcatttagtaatacatatcaaaatgtagaatatgaataacttcagaatttcaagatcttttattctacataattaatttttacagctgaaatgtgcctatctttttggcgatcagataccccctgccctccaaaatacagggttaaatctacataagacgtatacgatttctccatggcatatcattctaggcctgttttctgtaattccttgcctactcacctgcaggttatattctagtcttactagatttcttgttttcctctaaatatctcatgtacttttctgttttgagaactttactcagattatttttgctttttggaataccttctcttttcttcccttcttttctctttgctctccactgtctctgtgattctttctggtccctaagtacccacacagaagcacacacctctgttcctcttcctgtttagatgcaagatcttccccatgaaccctccctaccactattagctagcaagaatcactgctcacttggcatccacagccctttatttacactttatgccttacactgttgcttctcaatgtatggtctaaggagcagcagcaatagcagcctctgggggttgactagaaatgcagaatcttgagtcttgtcctagacttatggaatgtgtgaatctccattttacccagttttccagattctccttatgcatgctaccatttgagaagcactgtcttagagcagatatccaactttgccttcacttggttgcttttgtgtgagtgggttctgatagaatctggcttgtgatcacagactgtatcttcagcattcatctgcaaggcaggatggagtgctttgcacacagcaggagctcttaactgtgtgttgttgaataaaagcttgcattttcaatgaagaggggtgtttgagggaaaaaacaaatacagggtatttccatgattcttgtcggcacgatgtctttcagattgtctggtttccatcattgctgtggttgggttttatagaccctagtacaaagggactgatatggtttggctgtatcccacctaaatttcatcttgtagttcccataatccctatgtgtcatgggagggacccagtggcaggtaattgaatcatggggacggttacccccatgatgcctttcttgtgatagcaagtgagttctcacgagatctgatggctttataaggggctctcccctgttttgctcagtacttattcctaccaccatgtgaagaaggacgtgtttgctttcccttcctccatgattgtaagtttcctgaagcctccccagccatgctgatttgtgagtcaattaaacatctttcctttaaaaattacccagttttggatatgtctttgttagcagtgtaagaatagactaatacagagacttaccaccttatcaaatctctttcctcctctcacctctttgagaaagagttacagtggtgtggaggattacagctttcagaaagaagctcaggtgagttcattgtccaggggattgtatttaaagcatagggaaatactttgtattaatattttatgaataggactatatctgtgtatctgtgatgattgtatatttgtccaagaattggaagcctgatcacaaggtcagagtaagatccagaatcagaatttggtgcctctgaacttaggaaaataacattgttttagtttattatatttccttttgcaaaatttgacaaggaaaagcttcataatttcaaaaatgcttttctatcttgtgatacagattgtaacagacttatattcagatttgttctccaagtatctccatcttccccacttcccctggtattgctgtttttcttagtgtcacttttgccttctcctctcatctgtacatatttcttttgcggttttcttagttattctactcgtattccaatacttaaaacatctgtatcatataactctggtgatattcctgatccttcacaaaatgttgtgtataattaataaaattacagtgtgtataaatatgtaaaaataaataaggataaattaaaaataaaaataaaatgaaatatataattataaataaaataaaatgaagataaaatgtaaaaaataacctaacaggtgatttttttgacatagataagaacaaccctagtagggacttgccatttttatttctgtttttaaagcagatcttgaatatgtaatgcccgttacatccatttcttttagattattaagattaagacattgtttaaatacttctttctacttttattggctattttttttaaaaaatatattttatggttccgtgctctccctctggcatttgaatgatacaaaaatgaattataggaaccaaaacataatgctacttgtttcatcttaaaaccttaagttgcttacaatgaaatgaaggaggtaagatgttaccacataaagagaaaacactgtcatagagtttttgtttagagagatctaggacatcttggatatgcaaaaatgacaaggttggtagaacattgagggacagattagatgaattctcgttacttgtttttcccattcacatatccctctctctcttctctcttccgtcctctctgccttcctccctccttcccaaggtgtcttattacctttccctccctttgtccttctgtttttttctttggtggatgaatgtttgtaagatgtccattttgaagctgaaagcctcaaaggctcaaaggcagataattctctttttggaagtcattttacaaaatcctttttatgaacctgtctatagggaaatttcttcctgtcctggctgtgcaatgaaccatttatttgttctcatggataccaatacttattcattattttaaactttgtattttcttttttttttcctcctaagaagttcattttgctctttcttctgattttcctacctgtttgtaataacaggaattagtctttccatgtgtctgtgttgatttttttaatattactttagtgaaaattatagaggttacaggtttaggagctgttggggaaataaaatttaaaaccaaagtctcccaactgagaaattctctctataaaagtaagagagaaagaaaacaaatctattttttattcttaaacaagcattaaatcagaatgtgatgtacatcacaggtaatccactaagagatggcaaagacagaaagaactctcactcttttatgaagccaaacagcccattacatacgtgttttcaagataaacaataacttgtcctcaagtaagcttgacagcaccatttgtcacacatagctcatcctaactttacctggtaattgaggtgaccatccatgttagctgattggttttggccagaggaaaaacaaacttcacatatctttatgacaggaggtagttttttaacttggtgcaagttgcctaccaaagttagggtccaactctcccatagaaactgggagataggggtgctatctaccaaagttagggcccaactctcccatagaaactgggagataggggtgctatctcctgtgatgttcacttttcaaagagatggcctccaggtcttcctagtaaaaggcatttctaggtcacaaagctgacaaaaggccttgcttagccttcaaaaggatttatatacatttcaaagagtacaaaaagtactcagtaattgcaagttggccaaagtaaatgctctgagaaaaagaaagaaggtgaagaatcttttcccttattttcaacaagaattatgcttcttagttttaatttgtacttaatctgacagaagataggtcctatttcattatgtttaactaagcagttcagaattaaagttttactttttctgagtttgacattcagctgacttttgtctttggccttgtggtaacaaattatacgcctccaagttggaatctgatttgacaattcattagcatttctttaatttgtatttttattgtaataaaattgaccattttaaccatttttaagtctactgttttgtggagttaagtacattttcattgtgcaactattgccaccattcatccccagaatttttcacattttgtactcaaactgtagcctttaaacattaacttctgagtctgtcctcccctcagcccctggcaacaaccatcattatcactttaaccaacctattcgaaatgcccatgaaatttcaatatcctgtctctggatgagaagtggagaattgtgtttgcccaggattttaaagataaagatgttttcttgggaaactgactgagaaaaacaactttaaaaccttgaatgtggtgcacccatttatacaagtgatgccacactaattataaataacttaagtctgtgcagttccccagaaatgtctcattcgtgccacttcattactttcaaactgataataaaataccctcctagtgaaatatttttttgcatgtaactcagggattttactattgtagatttggcatttttcacaacccttgctccagtgaatttttatctttcttaattgatcttttggacacagcaaacgaaatattgaacacttcatatattttgttttataaactgtcgtggatatgaaggagaatgatgtgaaagaatcagggcagacaatctgttgcagtcagagaaccttaattaaaatgaagctttgctatttgattgtcgtgatagcttgagttagacacttcacctttctgcacctaatttcatcatctgtaagacaggaaaattatattcctttttgagtaagttgtgtgaatatgaagtaaaataagacatgaaaagaagcactgtgtatagtgtcaaagcatgaattatttcaactgagtaatgtacttaacatatggcagaaatttggaaaatacttgttgagtgaatgaacagatgttattctcaaggttaatttttctagggttctctcttctacacacatactcctgtctttgcttaaaacctaccctctcttggctttcctctgattcctgattgtatcttcttctccttacccaaattatgcttccagtttaaaaactccagatctcagagtttgggtagtgatttgaaagggctcaaggaatttctgttatattatttcatagaaaactcttcctttctaaatggaactgcttcctgaaagcttttgggggttagaaatggccattcgagttatccactgtaacatacacaaagattaagggaattttttttttttttttttttggctagcatcaacaggctcaggggagttcaccctagccaaaaaaaaatgatgagctgcaataatgttaaatcagacatgtgaatccaaattaaacagaattcttggtgtaattccaggctgttccctcgatggtcattgggtgggggctcactaagcaactctgttgttcagtgtcaccatacacatgataaatgcaaatgtatgtattataaagcagcataaccaaggcttacactgacaaaggcagatgacaatccaaaggtattctgttgaacatgccttgcctgacatgttttagtggaaaaatcacccccacccatgatgatctgagaaagaaatgagtgttgagagactgaaggagcagaaaacacataaaggaattatagtattttcctggattgagaaacagcctgtagaatcactctgtttagaagaatgtaatcattcactcaataatccagagcgttttctatatgccaggcttcaatgctagaccctgggagtcaaaaatgaatcagaagtggaccctgtctgcaaacgtcttaagagagaagacatacacacttatttaatagtacaagataaaaaagcacattactgagactatatgggaagcatagctaacgttttaggaagaaggtagaaattacatctggcagagggaagcagggaggtttcatgaaagaagtggtttcggaaatatgtcctgaaggacaggtggtatgtgtacacttggagagggtaatgaagggcatcccaggcagaagagatgagtaaaggggaaggaaggcacggggtgatctgtagcaatatctctatttgtacctgtggtgggagtgcttgatatgtgagaagtagtggtacagcaaagggttggaaagagagcttgctgccagatcgtgggaggattcagaatgtcagtgacggacatcagggaagtagcactaggatatgatgtgtgagcaaattgctttgggctttgtcatcagtcggcctttacaggtgttcccatggcacccaacccttacctgaggcttttacagccttcttgtttgcagtgtggtaaatatctcttcctttggatttagagaaggagatttcaggctgttttttatatattagagaatggaaagaacatttgcatgcaaaaactctcagtttttaggtcaccctaatacatacatgcattttcttccctttttcagaaagagcagaacaattgaaaataatagcccttttaatttttctaacattaaggtcacacaggtgaaagggttatttgctgggtctcataggtgcttactccttttatcattggaaaaataaaggctcccctctgttttctgactttttctggatggtgtcttatgttctgatttggcaacagtctttaagaatccagaattctggaagtagtgaaattataatcaactccaattagctacactggtggagcatagcattatcatacttaaatccaccagcatgtcttacatctcattttagctagtcattatgccattgttcctccatcagcttgccacaggagtggtttagcaaattagaaaattgatttgaatttcctacttttttcccaattaaaagttcatgagccttactctaaaactacctccagtaggagtaatacacccagtgagagaattcctaggaattcctcaaagcttggtctactgtttgggggcccttacacagtcaaactccacctccaccgtgtttttctgaaagaacttcattcagcatttccaaactgtggcaaggaacctgatgattgcagatgttactaaacaagaattactaaagtcaattagatttgagaaacactgtatattattactaagtaattgagtttcacaacatgcattagcatcctgaaaggccctgaaagaagtcctgtgggaaaagataacttttgaacctctttcacctaatattaataacctaatgtttctctaaactgagggtgaattactaaagcatagcctttcaaaatcattctgtaaaagcctaagctgaacaatgtggttcaatatgtggccttcagagggtctaagataatttaagaatgaaatttaaaatatcaggagactcgaattaagtaggtacatttattaggactctgcattgtatccatcctctatttacctaccaggatttacgtgaatattttttcatagcctggagatcctttcaaaccctgtctgtgttaacagagctgctacatctgatattattttccggaatctgaagaaacaccaaagaggactgaaataataagacattaatttcagctgtagaatgccgatgttgctgaccctgcagggttattgcagagggagattaattatgcatatctgccaccctaggctttggagttgaagtaccctgctgtaattcactgccggatcattcatgtagccagcatactgatatgattattattccaccaaggtttttatctgcccctagacaattacagaagcacttaccagcatctctcattgacttcttatttaaaattcccagggccacagcaggcattcgcatccttttatcggagacagctacagatcaatgacatgaagcaacatgggattttctgtaggacatgacaaatgctgagattgttgctaagcagaagatagacattcagattccagtagaaaatagtgttgcagtggctctctaacacaaacttttaaggcaatgacaagaacatacaatggaaatattatgagatttggtgtcaaggtatttgagtttgaacactggcttcactatttggtgtccaggaagctatagttcttctgtaaaatgggattgaaattaaatgacaaactcttggcagcttgaggatctggagatctctttaggttgtgagatgaaatgtatatatgtgtgaaatccctgctagggtatgtatatatgtgtgaatccctacgaggttgtgaagttttaatgtatacatgtgtgaaaaaaaactttgtgagtgacagagtgttttaaaaatatttttgtgctaatgggaatggctttcattccccgcgtagtcataatggaacatccttttcgtggccccactgcttgggtgatgacctatcgatgcctgtagtcacctcacacagaatgtagtgactatgcatcggtatgattagcagctgcatgcagtgtacatccttgaaatgatgcacagaataaaattcctatttcctattgctgttctcagcccagggttttaagggacttcgaacctgcaagataacattcatctgatttgcatttttttcagttaagttttcctctctgttctatagatcagtggcaaaaagtatggcttgttttgttttaattttcccctaagaggctttctcccttatgcgtggctgcatcacagaacgctacctgtcttcagagaccagctgtagtgccagctccaaggaatctttccaccctcactcctcagtctaaaccccttttctctccccacaactcctactctctaccacattaaaatgcaagtaattccttccccacagcatgctggcatgttgcttggactgatttgtatacttaataatagcatgagcaaacacagctacatagctttgtagagttaaagaaataataagagcagatacacttttaggtattttatatatgttaactcatataatcccctcagcaatcctaggaagtagaaattattattctccccattttgcagatgggagaagtaagtcaccaagagattaagtaactggcccaatatttcatgggtaccatgggggcagagccaggaattggtaattaaaataataggcttttaaactatgaggttacaatgagccctatgcaaattggagatttctataggttgtgagttcctggatgtctgaggcaatgaaaatctgtgtcatctattcacatttagcgtaagggctccgcatagtaggtatccagttacacgaaatagctttgcattgagaaaatcgccccttgaaagcttaggatgtggccacaaaatgccccccttgtcctctgtcaatatgtttttagtatacgttctgcattcctgctcaatatgcttgtcagagcattttaaaacctcacataagcactgcttgagcacctctctgtgagggaggccagtgttctgtttttttgtaagtagctgtgtggtaaagataaggcatacttgttgaaattagggttacttgagtctttagtggtttatggatcagtagataatagcactataacattccagctcattcgcattctgatgaaaggggaattgcatggtgttactttattttcaataaagtcaccaaatgtcaatgcatatgaaaagaactctggccatagtcctccgccccttccccccatccagtgtgatctggtggactgaggtcacagcccagactatgggactggtgggtgcgcattgccatctgtcaggatgatcctggtgcccaaaaattagtgaaagaagccatagaattttctcaacagggacacagactcacacagacctcctcagtgttagttcataaggggattttctttaacactttagatacagaaacatgatatttctttagggcttacttttttggcttatatgagttcccaggaaaacctggaatattatctttgtgtttcagggacaaaagtggggattggagcagtgaggatgcataataggctgttttctcctataggctgagaatacctgaaggtaaaggctgcactgaagcccctgtgctttctcccaggtggcgaagtgttggcctggtgcactgtaagtctgctgtgaatgttctaatttaactcttgactttaactcttcctaataaaactagttgtggaaactgaggcatagggacaatgaaatatgtggccaatgttatagcacttgttaatgccagagtcagaactaggagagggctcgtcctgcccatctctctgtgtaatggagaatgaggagcccctgggtgttgcagggtctgatggagtaaggggggcctctccgaggcttctgggcacctgaacaggaggggaactgaggccctcttctgctggatgctttctattgagccaatcatttttctgaaagaattgggggaatgatactaggaagtgctctgtgaagggacaactgactgttttgtgaggccaaggatgccttggatccattcaagtctaatttctgaagacaggttcatttcagaggcagtggatcttgatggctgtcacagaacttacggtggcatctgtttgaaccaaccttttgagaatattccattcttaggatgacctgtggcctgactagataatgcagcgtgcctgtgaatccatatgtaaaataaaagtatcaatgtctcatatttgtatcatatttcaccatttattaagctttatcataaacatgatctattgtgatccttatatcatcctatgaggtaatccttattttattgataaggattccagggttcagaggggttaagtacattatccaaggccacacagttaaaaagtaatcaacagcaaactagaacagaggttgactgtgtcctagagaaatgttattcctactacccagaaattgccttgtatttatatgtacttattgcataacaaaattggactatacactgtggacacaaacttagattcccagtcaaaaaaggagagtagtaagaaaaaatctaaacaaaacagatcagggcagaagtttctcaggcctctaagacaggtgtaggtatctacccagaggttttagaaaaggaatagtttatttttagacaaaggcaagatgagagagactctggagaagctgcagaagggacctgagtcttgaattaggctgtgggaaagttaagacttatttcctttcagtgatagacaatttggtctcaagtggagttttaaaaatcatctgtatcttgtggattgaggattgatttgggaattatggcttgggctcccccttctgcaattagagttttcactatggcagtattttccatgagaccttaataggtatattgcataaaaagaggttcatggtcaaattgttgtgagacattctccttagggttcttttcacgtgactaggaaagattaggctcacagacacgtagaagggtgagaaaaatgggatttatttggcaaaaaggaaaaaaagggaaacagggactctcaacaaagcaagagtcctgttaggaggcttcccgcctcacagattgaacccctggttcccacccaggaacaagaggaaccaggctcctccctcttgcaaacggtgtgaacctctgtagctccaccccattctcccagtgcgcaggctggtcagaggttctctagggacccctttacacttgactgtctcattccccctgaaagaagtacatctagctgccattagaataaggataaggataaagatggagaccaatcttaactgcttcctgctgacagggggtgctgttttgggaaaaatgacagtcagagctccctcagaggcctatgtaagggtccccagcagaaggggccatcatccaaagctccggttgcaagaccatttggagtttgatggcctgaatgtgagaagagacagactgggttattagaaaacatgtatttaaatgaaacaagtcgggggtgaggacagctcaaaaatcctgaggccttttaccagtttgcacagagagaggccaaaagcctgattggtaaaacaacttttacccttttaccatcatgtcaggcttctgggttgccttctcccgagcccaatactaagtcaactggtttaaggtttgggaaattaactttcccagtttggagcctgcatccaaggggagtgttctgtagtatagagacaaaattacctatcagtgaagagagggcagaggaggagaaaggaaaaaataagctgcttttttcaaaggagttccaggggttcaggatgcatttaaaggggtacggagtgaagatggatggctactcatctagaaagaggggagcaggcatccctggttcccttctcttcctagcaaatacctggggtgcgtgagggagagaaggaagagtgtcctctttccctcttccatccttgcatctctgagtcctggcagccttggcacgtgccgcccatggttgccaaagcaggcacccatgaaacagggggggcttagagaataggaagtatcttctctcacctatgcctctattccccctactgtcagtagccttggagttccctagacctcatttgtgccagggatactagcatgacctttatccatgaaatgggaggcttggcttaattggcaggaattagccattctcacctcaactgtgccttttaacctctgttatcatggcctctggatcccttagatccaattttctttcctagggctttgacctgaagcttgaaattgagtttgggacaataatgtgtctcatggggaattgcatggactccttatcataagccaaatgctgaggtaaagctgcggaattgagtcgtcctccaagaagggagagaaaatgatgtcttgtgacatttccagataactggtgggtatagttatgcttgctaagatttgggtgcatggcgcttggctttggttagctcccttggtcttactttcccaaaaaggaaacctccagctgatggatatactatttattcccatcacctggcagaatttgcacgataattgctcagaactagaatattgatccagatttctacattacccatcccatttgctctttctgagctgcagccagagattgctggttggttcacaggaacaagcaggattagtctaaaatgtaggcaaaaacttaaaaataactaatgaatttagaatttaatgacaaaggtgtgagaagttttcaagcatagtttctctccagtccttatttttgttaaaaagaaaaatcgtggtaggactgacttgtttgcaaaatagactttagtcttatatttggcctgattatttgcataaagtacagcaagaatatctgtttctacatacaccttttagattggttttggtggaactctattccacaaggaatttcagataagaccttttaaagctgagcctaaccatgggtttgtatcttcaaatacctatgagttgggtgatcctctcctcttaaggtcccaagataaatttggagctcttgggcctgttagaaagtgacattctctactgaccacaggtcaggaaccctgtacaaggactgtgtagacaagagtatgaagccagtttttttccccagagctttcattggctctgcaagttgagcttgactccttaaaggggagcatattcttcagtcaaacccttggtaaaacaaacagtttctgcaattgtgtcctgttgcaaaagaaaaatggatgcttattgtactgatgcaaacgactatattgccgtaagttaaaaatactcacagatagcttccaaattctagaggaaccaggcagagagaaacaaacatgcttcaaattttcttcacaggaggatacttactcaattattaaaggctgtaaatagttcaaaataagtttctttgactctgaaaaacaaaacaaagatcagcaatattccaagtaaaagttggaaagattgtttcagttttctcagttcagtctgtttagttcttgttttgcttgatatttgtgaacactacagctctttgagtcctgtacatttttcttttattccactgttacaatctccaaagttatcaaaaacctgtatttaagagcccctgtcaaagttctatagctcattataaacaatcttttgaaaaggattaaaacaagtcaacaattgtctgtgaataacaaaatgtccagggtagttacagttagaaacacaattgacaaagtttggttatctctgtggtttacaataacttaatataacaagcttgttatgattgatagcatatactcagatattagaattttagaaattccatacaattttggaacatatattagcattattcaccaaaatatttcctaaagaagattgaacatcattttggcaatccaacgtacctaaacatgttaaataatcctgtttacctctcttttctggacactccaggggccctttgaagtatccaaaaagccaggtgtcaggaaagacaattttgtaactaaagtttgattttgggaagcctgataagtatgtaagaagtttaaaacatttgatgttctgaaatagaattccagattatgataaattattttacaaaaatgatgactcaggaacttaacaagcaaaaatccttttatagccctttacaaattttgctaaagaataaattagtgccttaacagtcccttgttgtgctttgatttcaatcctcaatttacagaaaaaccatataatacctttttgaatttagtcaatatgttcacacagggaatttttgcaagattaatttttacactccttctactgcttgtttgaagttttagctttcttatctaatttaaaataattctttaatcctgggcaagaatttacatttttctcaaagattaaagtcacgtgaactgaaaggtaccacagcttttgtcttcccttttaaaaacatttgatccaagtgcttatcttcctttaggacaattaattagagctttttttatagacatcacacacaaaacacatatacaactacacccagtccccacaagatccttcatttggcaatctcatatttggattattagcctctgagtgctttaattttgggggttccatgagaaaaacagaggtctttcccctctcatgcatgcattaaaagtggtgaggcaaaatggagaaaaataatttggttgactgaaaaaaagaaaaaagcactttttccagaaaaacaaggtccaagaaaaggaaaacataaaggccttttaaatataactataacttggatatccacttttaattaagctgagcggtccttaagaaaatccttttaactcccttaatactcgacaagtggccaatatttctggctttcagattttactaaaggctcagagcaaggaaaatccaatgcagtttgtggaggggaagggaatcaacaaatagcaaaagcaaaaaagtcatacagatatcaaaccctgaagaactcatttcctaagccaggattgaatcccggccataggtaagctaaacaaagccttgccatgtggttacatgccacgcccccgaggacgtacaacaagatggaggcccgcaaggaagtattttacagaccatacagaaagactgcaaagcacaccagactggctacaacttaagaccagcctcacaaatcctttttcataattaaaactttacagagaatataaacattgatccttatcattcctagcctagtaaaatgtcttctaaaaggaaaacacaaacaaaaaataaataaacaaccaccacgcttaaaagtcaactcctgacctgatggagaaaaggaaagaaaaaaattttttttaatgcctgggaagaacctcttattcttatgcaaatgcgttcctccaccggggagagaaacttaattgctctccaatggggttgaaccccttggccaagggaggtgaagaggccatggatgcatagcattccccagccccagccgggatgggacggggaacggggagctgccgtttgcccgtccatccggaaaaaagaaggaaaaggccaaggaaaggctgggttggactgaggccgtcttttctgacccctgagcgtgacagtggtgggggcacagtttcctctagcctcagaagtctgaggttgagaaggtttagaaatgagagggaaaggccgggcgcggtggctcacgcctgtaatcccagcactttgggaggccgaggcgggcggatcacgaggtcaggagatcgagaccatcccggctaaaaacggtgaaaccccgcctctactaaaaatacaaaaaattagccgggcgtagtggcgggcgcctgtagtcccagctactcgggaggctgaggcaggagaatggcgtgaacccgggaggcggagcttgcagtgagccgagatcccgccactgcactccagcctgggcgacagagcgagactccgtctcaaaaaaaaaaaaaaaaaaaaaaaaaaaagaaatgagagggaaagagatttcttgttttgcatctcactcaccctttctcaaaccccatgttctgggcaccaaagatgttgtaggactttctccttaggattcttgttacacaaccaggaaagattaggctcacagacacacagaagggtgagaaaaatggaatttattgggcaaaaaggaaaaaaaaaggaaacgggctctcagcaaagtgagagagtcctgctagcaggcttcccgcctcacagattgaaaccctggttactacccaggaacaggagaggcaggctcctcccccctgcaaatggtgcaaactttcatggctccaccccgttcaaccagtgtgcagaccagccggaggttctcctggggaccctttatatttggctgtctcaaaataactttgcttaatgttgtgttaagccaagcggaccacagtattcactgggcagattactccaaacctttaaaatgccagtgtgtattgtgaatctccaagagatacgtgatatgttacttttcaaatttattttttggccatgcagtccttttgcagattgctcagcacaggacatgataattttcatctcggattttggaggaattgtatcctttttggccatttgctttcttgttgtttagtgtgtgtgtgtgtgtgtgtgtgtgtgtgtgtgtgtctctaactttgctccctacctgtgagatccctgattaaataaatgaacagtgtgtttatttctatatattgcacaacttctattaaagtgtataaagtaggggcttaataaatacattgatttgaatcaaatttgatgctgtagattcagaagctagggaattacaggttttgtagagaaatctatgaaaactcagccacaattttgttacttctgtcctttctaacagcttgtagaaaatgcctttctctcgagagtctcatagacaggatcgtgatcttcagaccatccttttgaattagagaggttattagtggcaatgtcgttaagtgaaatttaaggggagaaaacctcagatggctaagaaacttttctatgctgggaaaagtaattaatttcctaacctggaggtgactggatcttagtccacaggtgatatgtctgttttgggcctgtggtggtgataatttcacctaattccctacttgaacttcaaatggcgtcacattgcccaagtgatgtgctccttcctccctcctctctactccgcttccttctctactccctactctcaggtgctttgaaatgcctctgctgcagcactgttctctatactgtgtggggggaggtttggatgagaagagaaacatataatctcaaacatacagaaaaagttacagtacagcagaaagagcatttttttcctgatccataatcccaaacatgtttttatagccaaaagattcatttcacgatcaggcattgcatttagttctcttgccttgcttccttcagcctggaacagcctttccattttgcattaacttcctaccttgatacttttgaaatttacacagcagttgttttgtagaatgttcccctatgggtttgtctaatgttttttcattgttataattaaaagtatgtggtttgaatacctccaaaaattgcaagcttcatgaggaaggggatagtttctctccctcttcctccagactgtccagagcatgatacatatttgctgagtgaattaaaagtagtgtttgaccatctcatcataaattactcctccttccagccttgaagttccctgtcacattctgtgttggatttaatttgcttcctcggtttaaaattatatatatagatagatagagatctgtctatctatctatctatctatctatctatctatctatctatctatctatcttctatagttagttctgtatctttctgtaacctcttcctgttgtcttaaatacgctttaaccaacgaaaaagtttttccacattttttacagaagcacaacatattgacagtacataaatattgtgttcaactttttcattttgtttacataggcatcgtcatgtgatcatcacctaagaactagaacatcagcaggccctagaagcctcactcttgcccctccctttaatatctcaaaggtaattcattttctgatttaaattaagcaatttataaaacatttccttatcgactttaagttctctaccccttcagtttctttcaaatttaaacaaaaccaagcaaaaactttagcttatttcataataaacactaattgtcataatatatagcattttttatatatatatatgtatgtatacacacacacacacatatgtatgttttcacatgtcacatcctttgatcctctccatctaccctatcagatagtcagcacagggatttttactgctattttaaaaatgaggatatgaggcctagagaagggaaacctcctgagccacgattttccaatttccaatttcatcatagaggctatcacagtaatcttggcttttctgtaatttgtcaaggccagacttgacaactaaaactatcttctttgaaatattttgacaatagagcactaaacttggacctagtacacacaaagtgtagggcatggcaagttttgccaaatactcaatggtcaacttgaaccacgtaatttgggctcttttttgtaaataatattagtggtagctcacattgtctactactccatagttcctcaattatttcacatctattatctcacttaataagagttgatgataaacagcatttgctgagagcaatttgtgttcctggatggtgctaagcactttacagcaattgttaagactttcctctcaacaaatggtgaggtagttgtattagtttctatcattccccagcctcagtgtccctaagtagagaaatacttaatcatcaaattgtcctctggagagagggtacaatggaacaattccttaccttgtttagaaggatccatgaacccctagcacatcagtcttgaattaaccatcaagacagtgagctagttacagatcttcctaagaggtcagtatgaatattcctcacctcttctctcaggctctccagtatcacacagtcaaacaaactaggaactgcaagttcagtgctctttttaaattgctctttcaccttccactcactgaaaacccagttctagttctcccttgtgagggacaggacttcatgatggtatttcttacctcaccccacagagcatgttgctattcaaaatattaaagcacaaaagggaatcaatctgctcacattctattccaagcttctaaagatggcaggtggtatattatgtatatatgtcctctcagagtgctgagcactttgaagctatttcctaaaaagggagaaggcagtatctaagaggagtgtgctaatgttttcttatgaactttgactctgctgttatatcagtaaaggttagcagtactggcttggtaagctgaaagttggggcatttcattgatctctccatgtacctccactgctaggcatttctggaatattcagtgcttaatgacaaggctgtgttattttcaaagtaaatgttgaaaatagaaaccatatttaggttaaaacacctttctttaaactgtcaaaaaggctccataaatcatttgttgagtttttaaaaagaaaaatcataccacttaaaatatatttctaattaatgcactgtaacattaacttttttgggagtacagctctttgaatattaactcatgtatcgaatcaagtaaccactgtgacaaacaggatacaaaactgttctgtttctccaaacaactctcatgtgcccttcttttgcagtcatactctcccattatccctaaccccttgatctgttctcggtcactccagttctgtctttttgagagtgttatttaaatggaatcatacaataggcatcctattaaggttggtttatttaattcagcacaatgcctttgagattcatccaagttattatatcaacatatataatgctcattgcttagtattgctgagtattattctatttttttggatgccacagaatttgttgatccattcacttgtagaatgacaattgaattgtttccagctttaggcaattaataatagggcttctacaaacatgcaggtatagctttttgtatgaaagtaagttttcatttcccttggacaaatatccaagagtgagattactgggttgtatggcaagtttatgtttaactttattaagaaactgctgttttccagagagggtatatggacatttcatattccaccagtatgagagttccaattgctttgcatcctcttcatcacttggtattgtcagtatttattttttaattttagtcattctgaaaggtgtattgtggtatctccttgtggttttaatttgcatttccctgatggctaatgacattgaatgactcttcatgtgtttatttgacttttgcatatcgttttggtaaagtgtttctttatgacttaaacattttaaaattgagttgtttcttgtatgattcctccaactttattcttctttttcaaaatttttctcaatgtcttagggctttctattttcatataaatatcagaatcagtttctctatagctagaaaaaatctttctgggattttgattggaattaactaaatctttaggccatcttggagaaaattgacttctctatgttgagtttctcagttcatgaatatggtatgtctcttctattattttctagtaccattttaacaaattaccaaaaacttagttgcttaaaaagcacccatttattgttgcacagtttctgtgggtcagaaggccaagaacaatgtggcttagctggttccctgcttagggtttcgtaaggctgaaatgatggtgtcagcagtattgtgttcctttctggtgactctggagatgaatatatttctattcctttaatagttattggactattcaggtcgtctgtttcatcttagctgagctttagtagtttgtagtttttgagatgttagtccattttatctaagttgtggaatgtatgagcctggagtttgtaatattgccttattaccatttgaatatctccgtgatcactagtcatgtcccatcattcatttctatttttagtgatagtaccttttttccttacttaacgtatcacctggcttgaggtttatgttttattgttcttttcaaagaactaacttttggtttctttatttttctatatgtatatatttcctgttttgaaattatttgatttctactctataaaatttcctttattatgcttgtttcatttattcttctttctgtagtttcttaaagtggaagattagattatgggcttgctatctttcttcttttctaagataagcctttagtgctacaaattatcctctaatcactacattagctgcatcccacacacttggtatgttttattttatttttgtcaagttagaaatattttctaatttcccttacaactttcttttcaacccatatatactttattttaaggcatgtattttaattttgaagtgtttggagattttcctattatctttctgttattgatttctagtttaattctatggggagagaacatactttgaattcttttaaatttgttaaaatttgatttatgatacatgatacggtgtatctggtgaatgtcctattgaaaagaatgccttattttttacttttagaatcctcaaacagttgttccatcaaatatgcccgcgttttataactgcaaagacaggatgaagaatatttacttcattttaccccaaatcagagtcttccatgtcactttgccaaaactttcatttgctgataaatattagatttgaaatattctgcacaaggatcctattttcaaaaaaagccctgtaaactccacaaaagactgatgatgaaaataactctcatgtcttactaaatgctatcccttttgtgtagaatggaataattagtagcttttcctgttttcttcaaaggcttgttcattgtatcttaggtaaccacagaaatgccagacctactcagactttttgcagtaacttagagaaaataaaaggaaagatctgaatgggattagggcaggattgggactcaaggaagtgatttgactacagggttgaccttttatggggatggccttctggggtgtattccttggcgtgaatggccaagttttcaaaagtgcgaatggtcgtagttttcagtgggcaggtcatagaaaagggtgtcagtcaaccatggcagaatgaagcaggtttagcagtttcatggttataggaggtttatctagctgactgcaagtctttacagggacataaggtaggctcctggaagagggtgctgacgagcaccaggctgaaggcctaagtgggtgttttctgagtatagagctatatatgggatcaggaaactgagggacaaatccagtcctgtgatctggtgaagtgctgctgagcggaaggcaggcagaacaaatggtgattcatggcaaatcccacccttggcacagcaaacctagtttcagcctgtcacctgcgggctaggtgagagaattcagtggtcagagtgatgcagataaggagatgctaatgattaccaagtctagagaatgcagacgataaaaagtttcatatgcggaagtagatgttaaggtgctgagcacgtgaagacccatctttaacattgtcgtcgattacagagaactaagtacattttaaatcttcttgctaaatgatatagtcattaaagttgatatactgggaaacaataggattaaatatgagagatgtaccaaaagataagggagggagcatgaggattatcatgcagtaaattacacggataatgcaggaaaggctgggaagatattatatgtaggttagaatcatctgaagcaacagcagggtctgttaggccccattgcaataatctaaagctaagctctaatttagacactgagaatctgtgtttattacccacgtccctttgctttctgacagttcctccatctctgacccagcaccctctcactctaagacgcaacaaccaaaagtgtattactctttacgataataaaattctaaggctgaatacaagacaatgctaaatgacccagcattctctgagaggtttcagatcagccaggcgcctcccaataacattggtacctttaatctgtcaaaaccagcctgttcaatcacgtttccttttcagtctgctttattctaattcatcacagggcaggactggccctggatgtgtgttcgcagacaggttatctttagattagctttgccttggtgacctgactctttgctgccttcagcataatccagttactcttgggaatatcaattaaggccctcaatcacactaattagaatgtcttataaatgttgccttaggaattcagcagcttataaacaggcaaactgggaaaatctagaggtatgtgggggtttttaaatagctgacagcaatttgggagggcgtattgctttagcatagctgagaagtggggctgaaattacggttccctgaatgcagtgaaatctctagttgctctttgctggcaagtttaatgcagaattattaattacatttattaatgacttggatgaagatataggttgcatgctgatcaagtctgtagatgtcacaaagctaggaagatagcaattattgtgataacagattcaggagccaaaatgacttcaagacagaatttagcagccatctatctaatacgcgcctggcagtgctctataaagtacaatttgagggtcatgttgctcccctactcagaaaactttggtgactccctatttgctctttaaatcccaagcctttggcctgttatttaaggctttgccatattatgattctaccactgtctgctttccaacaaaatcttctgtagttctttttctaaaaccttgtgcttgagcaaaactcagttctttatatactattttccatttgtgttctatgctttcactacctttgagcattattctccactgaaagtttctttttctcacatgttccttctgtctcaagtctaaatatccataccagttcaaatgtcacctcttgtgtttcgtcttcttttattgtcttggctggagtgacctctttcctttgctaatcttcaataacacttatctgttcctctctatttttatcactttttacttcatattgcagggggttttttttttggtgcacattttaagtttctgttagaccctgcctagtgctagaatttctgtctggtaactctttttatctcttaagtgtctctagatgtgtgttctatacatagttgatgatactaaagtgtcttgctgggggttcatctttactgtggaaaagtgcctttagagaagaccctacattttgcccatgagaggcttcgtagctgtatcatagcaacttggaaactcaaaggataaatccttgaggggacggatattccattttccatgatgtgcttatttcacattgcttgcctgtatcaaaacatatctcgtccacacacacacacacacacacacacacacacacacacacacatctgctacataaccacacacacacacaaactaaaaaatttggaaaagaaggagaaaatgctcaatacatgttttattgaataaatgaaagactgatggagagaaaaagatttccccaaggtcataatataagagctggaaggaagaggtgctgggaagaaaacatcatttaatttatcagatgaaacaacagcttgtgatatgacgagctcacctgtgatttgtgtacaaccaggctaaaaaaggaagcatgaaccagagatttttggagaggtgtggtcaagagaggtgacgggagttggaaacttgcatagtcctttagggtggccacacctcttggattccttgtgtagtttatatcttttgttataatttaatgctcttaaaattggcccattttaaatgatgttatatggtcatcttatttatcaaatacctctttgatctgtttaagctgctgcatacctgtggttgtgaaacttgtggcataggctatttgagataataatctttgtagttagcctaatgtggatataaatagcatctttgtcacttactggaaatatgagctggacaagttatcaagacctctgcaagcattcttatatggctgttaccttcgacacagaaagcagagttcttgagcatggaatttctgcatcatcttcaggtttcagtatttataacccacagaggttttaccagtggccagatatttcttgggtagtagaaaaagaaatacttcacagagctgtcaaatctccacatcttcagcattaaatatcatgcaaccaaatgtaagggtatggttcacagcagttggctgtttcagctggttattaataggaaggcgaaagatcatagaaagttgactcctccctcatcatttctgtcttccagtgagaagaggagagcacgaacagcaggaattagatttatatattttccttaatataaattcacagtatggtagattgcagacaaagtctgaatccaggatttctagactttctatgtgtctatgtgtcactaaaagggaaaagtacctggattgtaaagtattccaactagaaatagaccaagggaatgcaaagaggggtaagaaggttgaatttatctgccagaaatgtaaatcctggtcaaaaaatccagatgaatattttttaagtaggcagttatagttcagtgaaaaagagagttgtggagccagaaagctggagtttgatcatagctctaccactctctagccaaaggatcgtggtgatgttattgaaacttgtctctagccaaaggatcttagttatgttatttaaacctgtgtattaaacttctttatctgcatgtaatatgggaattgaaaaacaaacaacaaaaaaacagaaacaaaataaaacctgtcttattggttggttctgacaatgaaatttgttaatattgtaaaattcttagaacagtccctagtctatagtcagcaggcatgaatgctagttattattatttaagcccttgaaagtagtaagtgatttcccttacctttgtatttatggttacaggatgacacttctgtggtgtgtagtgagtctctacttttatggaatcctgcaaagtgatgcctcaggtaagtgaatggcttttgacaatgtattaaaatgcaagtcatgcgtagggtaatgagtccactcttcctgaaaatgaatttaaataaacataatgttattcatgtccattgtcttctgcggtagcaaataatcataaagcagaataatagaattttgatgatggaaagaaccattgctgtctctagtcttcatgggatagagtacacagggggcagtgggccgctgtgtttaaacacaggtatttttcattaccttcacactcagccaactagaatattgcttttttcccttacctcaggtcctatgggggaaaaatgggagtgataatagcacaatctgtttttcaaatttgagccagtggtggaaaagttatcagtggtaataatccattgagatgttaaataaaataatgagtttttgtcatattgtttctatataggaaaaagaaaggatctgtctttagactcattctttctctggatgttgctttataagaggaaccagctaagacctttatagagtttgaaaaccaaactcagtcatcatgggcctggatcacgtgaaattagatatggaagagacttgctatttgaaagtccatcttttcagatctcctcttcttcccagaattatgcccagaatcactctctatctctgactattaatcattacatttcagcctatgtttttggactaatcaaattcttagaaagtttttagtacataaaactgaaatttgtctctttgattttagtatctaaaactgaaatttgtctctttccaaacatttacttggttcaactgtaggactgaaaaaaaaaaaagaaacaaacaaacaaacaaacaaaacaaccaaaacctaatgcaatggttctctaattgtaatgaagggaacctagaggtcctcattttataaagcttttcatgtaaaattcccctgaacaccataaaccatactttacatatcgttgctttaattccttttctttgtgagagggcttctgcaatgttaagttagctaccatataaccatgacctcagtgttctgcaatatatgccttcaactgtttttcatatgacatggatttgagctctcctaccatcctgatcatcttttctgggtgcgtttcagcttttctatgccacataaaacattgtattagaaaccaaaaatagtactaaaggagtggtataagtaggacagagtacagctcagtgctgaaactagcagtaacttctagccttgttggccctttggggcttcacagaggaatggctgtagataaccggagatgttattcggctgggatgcgctaggagacagctccttggctgtttagtccagcatctgtcctgcttggttaggtgtcgcgtttgataggtgagtttcttgatgtcctgattttcaaatatgttaaatataattcttgattttagtttgttcttatttgatttagttctatgtttgaatgctatctgctcacagaggcttccttgaccatcttaactaaaaatccctaccagtcactctctctccctccatcctgttttagttttctttgtaacactcacattccctgatattatattagccttctttctcttctctcctcctcctccctcttcctcttctcttgtttcctcctccttttccttcctttttttcttcctgaactccctgtccttcctccttttctgcctcccttctttcctttctctccatctctttttcttcctccttccctccctctgtcttggattttaagctgcctgagggcaggaacttgttcaggaacttttgtttgttatccaaacactcagaataatactgacacatagacacatagcagatgctcaatacataggtgttaaatggttgaatacatgtccctttacatcctttcccctgcccccagactgtccagttttataatggaacgtgtttgggttcatgccagtaattcatcatgtggttttatgtcctccctcatcctgaaggaagagggacaggtgactgtgttaccattgctgaaggatcatggaggttccagaagctaatgagtgctggtgccttcccagcagtcctgaccatgttacttttctgaatgacctttactgtaatccatccaaggagtccccagcccccacctcaagtgctgttggtaagagagctttctatccaggaactgtgactcataattctgccaggggaagctaacttcttgaataagataagttctcataccagccacattgcgtcaccgtgggagcaggaaacatgttgtaatcccctcagcccatctggcacgtactcatttgccttccttatgaagaggtgtattgtgtctgacagtgatgccacttcctagttggagggagaggaacaaaaaggacatgttgttgacaaaaacgaaaagagcaactggctctgggctagtgggggaagaaagaaatcattgcgcatcttgagggatcaaccaacctctctgcacatgaaagtattgccttttacaaggcatctgtggatgctgacagatttgttggtctttcatgaggctctccctgtgctcaggttcccatctcaacggaaacacaggttgatgtgaggaacaaagcagaaatgttctgaaaaccctaaagcaatctacatgcgtatcatattagtaagacatttattttgttctgagtccttccatgtgggccttttaagagaatcctcaaatataaaaaagaaaccataaaagcataagaacttagcgccatgcaatgtgttttcacacgcagtgaactggccgtgaagtcatacgattctgacttccgatcatgatttttctggtagcagtactgtgatccccttatcccctcaggaatgggggagcaacattttcatcttaggtgatgataaaagcaaatgattttttaagaaagctttatttccctttaaggaattaaagcttggataattataatagcgattctataattataatgtgctagttatagtaataataataaagctccctttgcttaaaaaagcagtttgcattgtacatattcaatgtcagtctcacacccaaaccatggggtagtcagagctgttgtaactacctttgttgggtaagacaagttaggatcaaagtatttaattgtattactcgaagtcacacagctatacttagcatgcttgtgacttcaacgagtttctggattcctgacatccatattatttttacgaaatatgctccagttggggtctattagaatataaattactaagaaaaaagattaagatctaagggatcacaggtaatcattttgcaaactgttgaagaaccactctgtgataggtttctatgctttgtaggtaaggtatatccttacacgcttatcctgccccctcacagcactgaaacattttcttcaggaggaaaatgattgtaatacaaaattcaaacccaatattcctttttttgcttattatagtattaaatattttcactaataaactcgaagaagttctgtttgtaagacttcgaaatggaaacttcagctcaatacacgtctcttttgctgtgcctcattggcagtgtgtcaggaagctgaactgttaaaagctgcctttggagtagacataaattttggaacctgtgatcccaagttgaggaggtaataaaaatagcaccatatagaatatagtgaatttaaaaaatattaccatatcaaaattatttgctggacaaatcacatgaaaaagagagtacactgccaccccaaaatgcaggcacacacacggatctttgagaaagattttatttcaaagtcaacagttgactgtgtgccaggtgcagggctggatttcacacacattatcaggaacttcgcaggaaccattgtacaggggtaggggctggagactcttctacctgtttgatagtttaggaaatgaagatccagggaggtggcccaagtgctcatgatagcctggcttgcctgatagagccaggctgccttgactccagaaacagtgctcttttttatttttccatactataattgcctttctttaggactgtgctctgctactagaagtaagatcctctgattccttttccattatattttacaaaattggtagagaatggaaatcatctatccaatgattgggagtgaattatacaatgcaaaataaataaatagtaaaaaacactgtggtttcctagtaattgagagattcaagttctgttttactctgtgacttgtttgatgacagtaaaggggtcatttcatcactttttgtcattgcatccttatttataaaccaagccaaccaaccaaacaattaacaaacaatagcagcagatcccagtcaattccagtttcttgatttttatgaaggaacactatgcatcatggacacacacagggtatactcctattagctacttaaattctttctaataacaatgttaacaatgatttcactttattctaaagatcatgcgtttgaccattttagattgtagaatccagggttagtaagaggaatttcttattttaagaggaatacagtaaagtttgagagaaggaagaggaaataattaccaaatagaattccgtgagagcagagaaagttaccaatcctatcaggagatattggggaagacttaatcattgctccttcctaggaagaaacgcatctcttatttgggaatgaaatagttcagggcaactcaaaagatagtgcaaaggcatttagaagccaagctggaaaggtaggttgggaacaaattatgcaggacgggaattacttcaggtaaagagaatgtccacatttaatgtattttggttatagttggctaggtttcttttcctttttttaaattctgtcgtatttttgcaaggacatacactattattaattctatgtgatggttctttcaccttttggtaagaattcagtttgttaccagccccagtggcctcattttatttgaatatccttgctttaataactccgtgctcagatatacttgtgacattgtgtcctgtcccagttgcccatggctggtcatcctgaacactcttcatttctatgtaatttagtccaaacatttggaaaatgtatgaagaatactgtttcattttattcttagtcctaaaggtcattggaattacagaatttcaccctgttgtcatttaaatgatgcctctcggaagcagatctcttcacttttttttttttctttagctgtgtttatagcttgaagcacacttatattttagttacttatatttcccaagggtggatttactgtagcctgattgaaaagaaatttaagtaccacataattggcttgatactgagtttgcaaatacacagcttcttgtatcacagtgataattctaagtttagaaaaatgacctggttctttttcacatggctgtgttagttaaaggaaaccagtatttttgtaggaactcctgcataccgttgtaggaaaaaatgtttgttttacaagaatttattctaccctttgaattacctttgtttttgctatcctttccctcactcccccaaccctgaatattcatttctaccatattttagggaccagattgccaccttagcagtgactcactaccaagaccagtttctacccacttttctttcaccacttaaaaagtttcttttctgtttaactgattaactttttagaaaataaaatatatacccacccaggataacaacacaatgattgctttatttttaaatccactgagtgctgccatctctcatttatttttgaggaacagtgagaaaatggatacatttaacaaataatttgggaacctcagtcaccttcaagttacctgctatccaaacctataaaagctgatgtacaaaattttctggctttgcctttgcgtgttttagagatagtgggaataatgaaaatgcaagatgactacgacaatgagagaaaataaataaaataatcacttcctcagcaacctagaccatattctgttgtgttttatgacattcatttctccttctaccataggaaccaaaatgcttggtatagctatacattactgggaaataaatagcacttttctgcagtgtttgtagggtctgaaatagtttaaggctcttatccatcagcccatttttttttacttctgagatactttcatatttatttatttatttatttatttattttttgagacggagcttcgctcttgttgccaggctggagtgcaatggtgcgatctcagctcacctcaacctccacctcccaagttcaagtgattctcctgcctcagcctccctagtagctgggattacaggcatttgccaccatgcccaactaattctgtatttttttgtagagatggggtttctccatgttggtcgggttggtctggaactcctgacctcaggtgatctgcctgcctcagcctcccaaagtgctggaatggcaggctactttcatattttttttaaagtgctctttaaggtttatagtagtgttcattttgatatgtgcaccaagatactggtgtttgcgtttcccccttcccttatgtaagaaaatgttatggtctctttgagatttggacttgccacccagtgctaccaagactgaccaatttagtctatttgccaattacgtttcctcagtggaaccttctccaggacctactgcatacgtgtagatactcaagaggaaagaaaaagaaaacaggcacatcgatcatgattttttttatgtgtgattttttctgttaactattgctttttattaatttattatggtgggttttattttttcctaattacttacccttgcataagaagtataactatgggccaggcacactggctcatgcctataatgccagtactttgggaggctgaggtggggagattgcttgaggccagaagtttgagaccagcctgcacaaaataataagaccctgactccacaaaaaaaaaattaaaaaaatagctgagtatggtgatgcacacctgtagtcccagctaatcaggaggctgaggtgggaggatcacttgagactggccggtaaaggctaaaatgagctgtgatcacgccactgcactccagcctgggcgacagaacaagaccctgtctctctctttctcaaaaaaaagtacaactatagttgaaatatagacctttattattattactagatgagagattaaattgtatttatcatatgtaaaatgacatttcgaagtatttatacattgtggaatgactaaatctagctaattaacatatgtattacctaacatagttaccatttttggagtgagaagactttagattcactgttatcactttaaagcaagcttgtccaacccgtggcccgcgggccacatgaagcccaaaacggccttgaatatggcccaacacaaattttgaaactttcttaaaacattatggactttttgtgattttcatttttagatcatcagttattgttagtgttagcttattttatgtgtggcccaagacaattcttcttcttccaaagtggcacaggagagccggaagattggacacatctgctttaaggcaaacagatatacaaattattgttcccaagtggataccaaccattattaattattatttactgtagttttgtttgccctttttttcaagggggagaaatctttaattgtttgccatagacttatctgatgaccagatgcaaaaacctactagctttaaattgatgcacctgagttaacctgaatgccctatccttctctagcgtttgggacttcagactatcccaaaattgcttaatggactgatgtttgatttttagagtgaaaacattaattttattcttatattttcaatgttttttgaatttttaaatttatctggtcatctagagaaaactgaatttcttatatgacagatattttgacattcacagcttgattctacatgtctttttgtcattttctggtgtccactcaaggtaaaggcaaataagaaaaaagagaagaaggagagaaaagaggaataatgagggagagaggaagagagagagagacctttttttgaaaaagagagatagtaggaaaaagagagagagaggcataaaatgcaaagagaaaaatagagataaaatattcctacacgggtttcctggatctgatgtaaacccggctatatacttttttcagattaccaaagaagctaaaccatttttaataccacatttaaatactcccccctttttttcctgagctttgcattgaatggtttcctttttgaacagttaatgttttctaggtttttttgtttgtttattttacattcttactctttccctccttccgagtatattaaaatggtgagagaaaatagaaaccttaaatattccagaagtttccttacatctagtgcccctacagccatgagagtggtcagcatgtccagggttaatgctttgttttttttttttttttttttttgagacggagtctcgctctgtcgcccaggctggagtgcagtggcgggatctcggctcactgcaagctccgcctcccgggttcacgccattctcctgcctcagcctcccgagtagctgggactacaggcgcccgccaccacgcccggctaattttttgtatttttagtagagacggggtttcaccgttttagccgggatggtctcgatctcctgacctcgtgatccgcccgcctcggcctcccaaagttctgggattacaggcgtgagaatgctttgttaatcaggatacttttattctgaaaaaaagtgtacagcagagatggtggagacttaaagctttgcatgcccctcaggataatgaaggaagaagagatggcgggcaaaagtgtaagactctggacccccttttgcaagtttatacgttctaaggcagaaacaatctgctgtttgcaattgacactgagctgtgaaatgtttttgctagtagcagtgtatttcttgaggcacagtagaaacccaaccaatctatattcaagtctaagaggagggtgtagctttacttggaggttgattgaaatcatggaaattgtgaatggagtaattagtaatcggaagtgttggaggactttctccctcccgctgcatgcagtattcttagtgaaatgctaaggggaatttcaggaagaaagtgaagacggggttggttgttttattaaggcaaacttttagctctctcacctttattactctaaatatcctgttcttaaaaaggattcttcctctcatttataatgcagtaataattgatgactacaataatagccatgaagcattttacagtattgggtttttaatcactaaaagaagaccatgttaagctaaacatggctttaaatctattttattttaattctctgtaaattgataattactatatagtggtgggtaggtatgtaataggaaggaaggtgaggaaactcacattctttgaatcaaggattatattcatataatattatattcatttctgaaaagcctcataattcagaaatacatgttttcttccatcgttacaagtgagggactccaaattcaaaaaattgaatgaacttacctaatatcactatagaagtaagtggtaaaatttgtattgctctttgactttaagatgcactgtcatttaaaatacaccatgctgccactgagttatttataattaaaacttcattttaaaacatgccaaccaaatctgtcaataattgatgatacggaacacacatatttgaaaagaaacgtttaaccagttaccaaaacagaatctagtatgtgatttttcgtgttgcaaataaaatttcaaggtgatttgcttcagtcttcctgaaacatatacagtacattttaattgtgtatatttagataatatacatctttccaagtttatacaaattttctcaaaggaaagcagttctatacaggaagaagattgcagatgaatgaaggaaaggtggcttggtacaggtgcagtgggtttgagtgcagtgggaagctgttaactttagtattctgcaaggttgctttggcattattcatatggcttcccctgtggctaactcagagatactaactctaactccctagcttttgctccttttccaatgactgactgcaggctctgtccctccacttaggtgttaagggactcagtcaaggatgtttacatgtgcctcagagatttttttgggtacccagcagtgtagagttctagaaagttcttttcagtttacaaatgccagttcttttctgctagtctttggcagtgattgaatgtgaattgtgaaatttgattgtggtctcactccaagttctattttatttctggtggagctggaatgttttatctttctcggaaacgatcactttttgtgtgtatggcaacaaaacagctagaataactgtcacttgggctcagcaagtacacaaaagtatgggctgggggcattttaaccaatccatattcatacacaggtaagctattccacttactgcaaactctccagaattgaaatcccagcagatttaatacacaaagcctcttcagtcctagggaaatgagtttttttttaacagactgattattcatttcaaaacatggaatatttttgtcataaaaggatgataagtattgccctcctattttaaatatgtacctttgtgatttaatagaaactggtcaaagatctatataacctccacatttagggaggttggtccttcatgattagatgtgaaacccagttcagcatatgtctcctgggcacctgttatgtgcagacctttgtacgtagggtaggcaaagatgaagacattgtgcgtgtattcattcattcattcatctgtagtgtgtatgtgctggacactgtgcttgcctgtattggtaaccaaaacaaaaattatctttgccctcatgaaattcacagtcttggggatggcttcaagtcttttcttacttgaagaacgtaagtaaacaaatttttataagaagttctctatagttataaataaggcattatattgatggaaagtaatgggatattcctttccttatcccatagttaaggaaaatctattaaagaatatgctatttaattgagaattgagggatgagaaagagccaccttcaaaggcagtggcatgagatgtaggccttgggttgcaggagctttgagaactatggggaaagaaacatgcgacgaagaggaagccgtggtcagagtgcagcacatactgagggtgttgttacatttacttgaactgcagtaaaaggccattgaaaggatttgggcaggactgttacattatccagctaaggtattaaatgatcttgtgagctgctatgtaggaataagattggaaaagatttctgtttttcccagtatggcggacaaggtcctctaaacaccccttttgctgtaaagcagctagaaatgctgcatttaaaaataaatgtcatttaaaatgaattgctgagttggtaagaaatccttagaggccaaaattgaagtgaaaacaggaatccagaaaagaaaggaagccagctctgcagctggcggctacccagggtaacatccagagtcagaggaaggagatatatttaaatgcgaggacatttggataatttttagaaaaaaaaaatagttaaattcctaccttgtactttacctcaaaacaaatcgcagttgaattaaatatttaaatgtaaaaaaccctaagagtagtagaaaaaatacatgcaaatatttattataatgttgggatggatacatttgtagatatgtcatcaaaggtaagggtcagcaaagaaagtctgacataattgactacataaagattttaaaaattagtatagcacagaatattgtaagttaaaggacaaatgaaaaattgggaaaacatatggcaaagggttaatgtcatcagaatgcaaggagctattatatatatatacacacacacacacgcacattttaatggaaaaattggcaaagatttgaaactagcagttcaggcagtcaaaaacagatcaacacaaattgatcagtctaaaaagaagctcaagttaacgagtgacaaaatagattcaaactaaaccaacatgcgatgccattttttttcactcatcagtctggcagagattaaagaacaatccagcctagcattggtcaggatatggtgatctaataaccaggtatgctggtctctcacacacagtggttgagagctcacctggaataggctttgtggaggggacctgggctatttgtttcaaagataccaccaaaatgcctccctttaatcttgtaatgaaccatacatgctatattctaagaaaatactcggagaaatgcatcaagacatgctcaaaaactatatttttcataggattgttacaatggccgggcgcggtggctcacgcctgtaatcccagcactttgggaggctgaggtgggcggatcacgaggtcaggagatcgagagcacggtgaaaccccgtctctactaaaaatacaaaaaattagccgggcgcggtggcgggcgcctgtagtcccagctactcgggaggctgaggcaggagaatggcgtgaacccgggaggcggagcttgcagggagccgagatcgcgccaccgcactcccgcctgggcgacagagcgagactccgtctcaaaaaaaaaaaaaaaaaaaaaggattgttacaataagtaacattggaaacaatataaatattcatgataaagggagcttaaatctatatatatatgtgtatatcaatacaatggaatatgatggattcatttatggtagatgtttctgtataaaaacaaataccatatagcagaactagtgtgaaacctttaccaactgtggcagttgtttgccggagctaggtggtatgggcttgtaagaaccaactattcaatttttaggaagcttttgagtcatttgtcaaattagtcatttgaagttggctttggtaagagtttttaccacatgaaaattggtaaaccgatgctagaaattagctttgtcatcatcaacccccggctgtttaccagcacgccactctggtcatgcatgtgtaagcatgtggaaaacctttctggcagaagatacatgccttttctttcccccctgcaggatcttgctctgttacctaggctagagtgctcactgcagcctcaaattcctgtgctcaagaggttctcttgcctcagccttccaagtagctgggactataggggcatgccaccaggctcagctaattttttaatttttttgtggagatggggtctcgctatgttgcccaggttggtcttgaattcctggcctcaggagatcctcctgagtgatcttcttgtgttggcctaccaaagtactgggattacaggtgtgagccaccatgtccagcctacacccaacccttaacagtgattatctttgaaaagtggaattatgtttgggtttatttctgccccttttaaaataactttattttctgttactacattaattcatttaggattatggcctccaactgcatcggtgtttctgcaaagggagctaagcattgggcacacatgggcataaacatgggaacaatagactctgcagagaactaccagagggaggtgggaggaggacacaggttgaaaaactacctatcgggtatctataccccaaacttcagcattatgcaatattcccatgttactaacctgcgtatgtacccccatatctaaaatgaaagttgaaatgaaaaataattcaaaaatgaaattacttattgtctgactgtatttcaatctaattaaatttataattggaagtaaagggtaacttaatttttagaagtaagaaagtatatagatctgagctgttgtattcctcgggatggcaagcaagaggcaattgtgacaggtatgatagtttaagccttggctctttgtttctgtctgtaaattggtatgttaataacttctctagcacagaggtaacttcaatattcatgaaatgacctcagtagaatactaaattagaaactttgtaatggaaaatagatattaccatagattttcctgcattataaccatggcttgtgtttgtgtatttgttagcatgttgtgtcaagaaaataagcattagctacccaaatacttggaatttgaaattagcaactccccactttcctccatcagtctactaatattggatactgtattagtctgttcccaagttgctaataaagacatacccaagactgggtcatttataaagcaagagaggtttaatgaactcacagctccacatggttggggaggcctcaaaatcatggaggaaggtagaaaaggaggagcaaaggcatgtcctacatggcagcaggccagagagcgtgtgcaggggaactgccctttataaaaccatcagatctcatgagactatcatgacaacagcatgggaaaaacccgcacctgtgattcaattacctcacactaggtccctcccatggtatgtggggagtatgggagctacaattcaagatgatatttgggtggggacacagccaaaccatatcagatacttagccctaaacctatctatacaccctgattcttaccaactttatctactcatttaaacatatctctttgttacaggcagctttctgttttgtttgtttttggttttgtttttaaaagctcagtactacagaacatagtaagctagttatcaacatttccgtatctgtaggcatggttatgcatgtgttaaattaatacttcttccttcaaccatcagcctttcttcatttctctatgcaataaacatatgttgtattgggcttacactgtgtgctagatacagttcacattatcattatattcactaaccattacagggatgaatgatatcatacagtatttacagtattaaaatggttatattatttgatcttagaatagcattgtaaaatatattattattgtcacttcacaaataaggaaatagaggcccggagagattaggtggtttagacgtagttttgcatataggaagtagaaccaggactcaaggttttgtcctctgttcccaagcccattattctttttcctggcagacccaagggattcctacctttttattactgaggacatcttttattttatattttttctaaagattccttttattgcaagcaataaaaccagacacattagtcgtgctgccatcacaacaatctaattttagaacatttcatcaccccaaaacgaagccctgaggattagcagccaatccacaacccattctcccccacccaagccctaggcaaccagtagtctacttcctgtctctatagatttgcctattccggatatttcatacaagtgggatgatattatatgtggcatattgtgattgatttagttttcacttaatgcaatgttttcaaggtacagctatgatatagcatgtatcactacatcattttttagtgatgaataatattcatcattgaatcataattgagaaatattcttcatccctgatgcacctgtgtgtgatttccaaattttgactatcatgaataatgctactatgaacatatgtgtacaagtttttgtgtggacatatgttttcatttttcttgggtatatagctgtaagttgaattactggatcaaggtaactctatgcttaacattttgaagaactgccaactacgttccaacgtaactgtgccattgtaaatgtctttttgaagtattttgaagtatatacctatttgaggtatttgcactctcatattcaactgagaacatctcctgtgagtatctcatgttcaactgatttcagctcttgtgtatctcgtgttcaactcttatgctcaactgatttcaactccaatgaatatctaccaagaagtgggactgctggatgaaatgctactctcatttttaattatttggcaaaacttccatagtgtttttccagaatggataaagagaatgcattatatcatacaattgagtgtcagtcagccctaagaaaggaggaaatcctgccatatgcatagacctggaggacattatgctaagttaaataagccaggcacagaaggacagacactacatgatgctatttacatgaggaatctaaaatagtcaaactcatagaagctgggagtagaatggtggttgccagaggctgagaagggggagaaatggagaggtgttaatcaaagggtgcaaagtttcagttacgcaaggtaagtcctagaaatctactctacagcttagtgcctatggttaacaattctgtattgtatacttaagaactcgctaggaaattaaatgttacataaagtgttcttatcactaaaataattaatacataaatgaatacataaatagggcaggaggaaacttttagaggttatgtgtatgtttatggcatagattgtgatgatggtttcttgcccgtgtatatatctccaaactcctcactttaggcacatcaaatatatacagctttctgtatgtcaatcatacctcagtaaagtggtttttaaaaaagaaacagcagaagaggtcattgtgaattcagaggtcttcagaggactcagccctttaatctctgattcagtaaagtggcattcgagtgtttccttttttgttagtgtaacaaatataaatctcagtgctatgggagctcagaaagtgttctggatcagaacatgccctgggtaattcacagtgtataaggcagagaagaaaaacctggactcaagtcaaatcctggtttccgtatgactctcagtgtccttatctataaaatgaagctgatagtatcagccctgcataccccacagagctgttttggagatccagtgagagaatgaatctaaagttttctgtaaccagtaaaagcaaatcaggaagcagaagctcagtcaaatgagcctagaaaccacacacttggcaggtaggtaagcaccagttggtgctctgtattatgagattaggactgagaccttttacattcgaagctgggtgcttgccgacaagaatccgtatttccaaatgtgagcaaacccttgcccagcagagttttcacaaaatccagatgttgagttttgtgtcaattgtttaagaattcaaaagcagatagtagcatatttttcaaaatcagttgcttgacaaccagtttatggtcctatgattctctgccaccttccctggttttgacgactctaaatcagttgaaacttgtattatttttctattgtatttttcaatatatttgccaaagaatatgggaaaagaaactttattcattcaacagccattgtttgaggtatttccatgagccaggtatttgataggcattaggatatggtgaagaacaaatagtccctgttcctttcttcatgctcgtttgtgtctcatatgtctaactgtttcagggtccctgctattcaccgtgactcacagatggcaccaatactgtgttttaaaaatgaaaagcaaagtggaggtcaaagttaggttctaaaaaaaataaaaatgaggaataacataaggaggataaaagatgttgaggctgcagttcagttctgttgctaatttactgggtgatttgggcaagctacttaacctctcagaatctgtttccacatctgttaatttgcttagttcttgactctaacaagctagcattctgtagtttgagatttaagagcctctgaaacaagtttcctttctatttctttacatttttgatcaatccatctttgctcattttccatgtggctcttatctgctcctctccatcttaagtattatcctagtccaagccacatcatctcattcttgaacttttcttttcttttttttttttttcatttgagatggagtttcactgtttttgcccaggctggagttcagtggcacgatctcggctcactgcaacctccacctcccgggatcaagtaagtctcctgcctcagcctcacacatggctgggattacacgcgtgcgccaccacccaggctaattttgtatttttagtagagataaggtttcaccatgttggtcaggctggtctcaaactcctgacctcaggtgatccacccgcctcggcctcccaaagtgctgggattataggctgagccaccctgcctggcacattcttaaatttttctgcagtagcctcataattagctgtttctccttcacttttactctctacagtccattcttcacacagtaaccagtgttacctatttcaaattgtaaattaaatcaggtgtctcctctgtggaaaaccctggaatatgtcccattattcttagaattaaatttaagttccttacagcggcctatatgctcttatatgttcaaattcctacctgttgcttcagcttcttcatattccactgttttccttgcccctggcagtgaagttttctgagattcttcaggaacttcacatgtactattccctttctcacctaagttcttccttcacacactctcctctcaactttgtccctcacatcttcattctatttcactcagctcaaaagtccatttctcagggaacatcccatctcctgccctaatcagcgacctctcaggctaagtaagatccctgttaatatatccactttatacgctgtacgtctttttcatgataatcactccaatagcaattgttgttaattgggtaattatttatttaactacttaattaatgtctgtgaccttctctagaatgaaagctccatgacaacaggcagatttatttgcctctgtatgttttatgtgtagcaaagcctttgcagttagtaggtgctcagtaaatactcagcgaatgaatgaaaggatataataaataggtaacacttaattctttaaatcagctatgagattattttgtatgagataacaaggtatatatgccagagagttctgaagaagcatagacgtttctttctatgtagttactgatctctgtttttactgtgagtgcaaacaatactcatgccaccccattagaaacaaatatccaccaaactctgtgtgctgggcactaagctggatgagcaggactaaagctctctctttgagctcacaatctagcagcaaattagcctcaaataacagttacgcaaggtacgaagtggttagtatcataagagaggttcagagaaacagctatggtggtttcaaactgagagaaattgcttcaaactgagagcagccatctatatatccagaggtgtagtgttcaatttaggccttaaaaaatttgtgtgatgtgactacttggagataggtgagaaatggcaatgaagaatggagctatgattaaataattgcctctgcccggttgttacaagtaaagccaagtctctaaacaagaggcaggaacttaaccttttaaaatttatttttatttttattcactcttatttacatatggtcaaattgagttttttggtgtaagaagtctgtgaattttgacaaatgcatacaaccatgtaaaaaccaccacagtttaggtacagaaagtcccattatcctcccaaatttctctcatgctgccactgtgccgtccccccacacccagtcactagcaaccactgatcgttttctgctcctataattctgccttttccagaatatcagatagatagaattgtactggtctggcttccttcacttagcataacacatttgaggtacatccatattatcatatgtttgagaagtccattccttgttaccaagtaacattccattgtatggatataccactgttgtttattcattcattagttgtaggatatgtgattgcttcaagtttttggctattatgattaaggctgctgtaaacgtctatatacaggctttgtctcaacacaagtttttgttacctaggactgatattgctaggtcatatggtaaggtcattaggtatgtttaacctaataagaggctgccaaactcttttccaaagtagctatactcaattctgtattcccgtcttcaatgaatgagagtccagctgctgcacatttcatgaacacttgctattttccattttttaaaatgctaaccattctaatagttttacagtagtatcttgtgtgatttttaatttacatttatataatgactaataatttggaccattttgtcatatgtatatctcctttggtgaagtgtctgttaaaatattttgtccctttttaattaagttcctgatatttttctttgacttttgagagttctctatatattctgaaaatgagttcttcattgaatagctgatttgtggcttgtctttgctaacctttaattttcttgttattttaaaaatcttgctcccaggcccatcactggatctcctatagtctcttaggtctactcagtatgtttatagaacttctaggttttttcagacacagtggggatctaggaagatgaaaatgaccattgccctgttaacaaggagcttttgagtagctggaaagagaattcaggtatccaaatatttataacccacgaaataatgtcccgagtgccatagggatgtatagatggtgtgctatactgcagagtgttgtcactcattgaggtttctggttactaaaatactttgaggccccgaagagagaaacaataaagactgtggatgattacatcctacaaactgtaacaaagtggcttccctctttacagcctcatgtattatctttgatgatgatgggcattaggggatgaaaaaggggccgtgccaggcaatgcagtctttctcaacttgatcagtcacagtgcccactctaaccattgtcaagcaaaaggaccacatcagaagccattagcctcactgcatctccccaccccctcagcccgtttgctgtaattgtcccatttgacttcgtttaataacaaatgggtaaagaaattccatgcttgacacatgtggagttgcatgtgtgtgtgacccatcagacagcttcagggcacaagtatactgcccagcctatcttttgcttctgctcatactaatcattaacatgtgtcactttaggctgggcatggtggctcacgcctgcaatcctaacactttgggaggccgaggcgggtggattgcctgacctcaggagtttgagaccagcctgggcaacagggtgaaaccctgtctctactaaaatacaaaaaattagccgggcatggtggtgtgtgcctgcagtcccagctacttgggagggtgaggtaggagaattgcttgaacccgggaggctgaggttgcagtgagccaagattgcatcactgcactccagcctgggtgacagagtgagactccaactccaaaaaaaaagaaaaaaagaaaaaaaagtcactttattcattaagtaccattagtgactctcagttgctacaaggataaagtttgttcttaccctgattgaccctagtctcattgaccctttaccattctcatgctttgtgaaatcatcccacaccctgtgatctaaccccggctgactcatggactaactcatcatggctcacatcagcctggactcctccccttggaggaggagtcagtgcacattctatgcattttttccagacttaaatcagatgccatctcttctgtgaaggcaccgatgagtgtcacccatcttgaagtccgaattaaaagtgccttctgccctcctatgacacgttgcatctttattttttccttttagcatttgcttcattttgctttgtgttgtggttgtttgcctgactctccacccagtcttgacagtgagatctttgagagcacagtctatatcttccttgtatctttatccctcgttggagcctaacataaactgttgcatgtggtaagttttcactgagggtttattgattgaaggacatgccataagccacagttcaccttgctttgtgacccagacagaagaggtgtctcagtggctgatagttgtaactggaggtgacagggggctctgatgtgttctaagcaaagacagccctgtttccctattggccgtgattatgccctcctatctagaataggaaaagggtgatttgattttgagcaataagcaacctgactctaattgtctaccttaaatgccttccattgttctgcttaaggtgattttctaccagcatgaaatgttctccttcccagacagttgatggaggagctgagtcatgcctgactatacttaataagacagaggcagctaatgccccagggagctgccttcgaggacagcttgacatttctgactcctctgctttttaaaagtgggtgttgtgagggaaagttaagcatgaaggtagcttcggagtctccactggaaacaggactatatagtgacactctctaatttagacagatgtgatctaccccgctgcctcttggctgtgatatgtgccttccgatgctgggaggtgctaatcaaggatgtcatgtttttcatgaaagagtctcacttgcttactcactttgttctactttctattaatgagtgcccacccacttccgttcttttctctgaaaaactggcttgatttatatttttcagagtcaggctagaaaatactcttgaagttagcatggattataaacccatcatattatagagatggacagggttacagatcatctggttttaccttcttatacgtgataaaactgaatcccaaagcaggaaagtgacttggtcacagtcagcattaaatttcagactctagagagtgacagatctgcgttagaatccccgtctcctactgacttgctgtgtaattgtgtgggtatcttttaacttatctatgcttcatgctcgtcatttgttaaatgagggccataataaagctatctgaaagaggcattatgaagagtgaaaatgataataaatgtaaaacacttaatacctggcgtatagaaaacactcacaattaagtgaatggtactggtagttcctatggtggtggcagttttataatggtggtcacactggcagaattaggacaagaaaccaggtcttctgaccctatgtctttgttctccatagggtatactacaagatgtatctcaggaactatatttagctatgaggaagtttaaagtgatctgtctgaagatgaattcctatattcaaagaaaggatcagtagcgagtttgctgtagcacagaaggaaaagaaaacatggtttgagatgtttgtcaacatgaagaatcaaattgggcggagtgtttgagggaagaaattatatgtaaaatctccaaaataaaaaccaaggggctgagtaagacctgagaacctgaggtcagtggatagaggactgactctggaatcagaaaaactgctgcccaatagctctgtgagcttcccaattcactctctgaacctctctttcaaaccccaaaatggggcaatatcctctatatctgggatcaaaggatataatatgtctaaaacttccatctaaactatacattactatggattatgtcaacaatgttggatttgcagtctttggtgggatgtggtggaagaaataaggcaatgatttctaagtgatgcatttgaaacattttcctacctcaaagcatacggagataaaaaggtctcttacatctttttttctttctttctttttttgagatggcatctcactctgttgccaggctggagtgcagtggtgcaatctcagctcactgcaacctctgcctcctgggttcaagcgattctcctgcctcagcctcctgagtagctgggactacaggcatgcgccaccacgcccagctaatttttgtatttttagtagagatggagtttcaccatgttggccaggttggtcttgatctcttgacctcgtgatccgcccgcctgggcctcccaaagtgctgggattacaggcgtgagccaccatgcccggcctacatctttctaagcaaccatcttcattattcattttccactaggcagggaatcacatgcagcattgggagtccaaaagtcctcagggatgagtgtcttggacttgacagtgttgtcctggaatatatacctggacacacatgcacacacacacaagatgtttgtgtgtgtagttgtagttgtaccatgcagttcctaaaagccctcttcaaatgactgtgagttattttcctggtctttcatctatttttctaaatttgatttttctagaatgtttgttttcttcacatatgaaaagtacattctcttgttttgcttcctttgttctagattttagagaagttggtttgtagttttctctttcccaataaacgtatgaggcaaatgttctcaaccttagcactatagtaagtcaataagctcaacataaaagtacgtataaaaatttaacccctgacataccaagagaaaagagaaacaaagattgatataagtccagtataaactcttatttttgcagttggttttatatgcagaagtaatgttcatgatatggttatcagagagacttttatcctgcctctgctactaacccagtctttcacctcaggcattccctagcccctctggtgtcagagcctgatctgtataatgtgtcatggggctggatgatttttgaatccaccttccagctctaacatgcagtggttttctaagatgcacggtggattataggggacttcagtgttcagaaacttagaccaggattttatcttagcatttactcttcccaagaccctgcttctttccttgggaggagatactgttctctaggtgagtgaccactaaaaacctagccactcagcacccccacctcttgaattcttcctgtcaccccatcatattcactgccagacatttctccaaaccccatttctcatgctctcagcttttgttgcttgcttcacccaattttctctcagaatcttttgttttctgcttgtcactaccagccatcaagaaaaatctacacgcttgacacattattaagatagaatgagactgcaccggcgtttcgcaggtgatgcctctgttaaacacagtggcaggattgtcgcctgtgtctcttcctctggcaggtgatgaagatcataaatgttcttttactccaggcagtttcctgagaattgctggggaggttgctgacaaggtttgctagatgcactttcctttgactttgtaattttgcgtggaatattggctgcacatcttgaggcggggaagttagaaagctcctaattgaaagttgaaggccccgatgtacttttatggaatgagtctctctgagcccccaactgggaagtgtaagacatggtgttgaaaggtacagagacccattaaatacatgatgggctttaaattccaatcatgctgttgagtggaaaggtgttcactgacgtatccttggtaattaagaagagagttcatgctcagactgccttctgcattttaccactcaaatccaagctttgagtttcctgcccttggctctggtaaaaggcaataaaaactcaaaatcaaacacacataataattcctttctctgctgattctctttccagatctcaattttctcatctgtaataatccacatcatgatagctaaaacatattcatattaagttcttactgtgtcagagtccatgtggcattttcgtgtatcatcttatttaccgctaacaacagctctatgggattggcactgattaacttcatattttgtgacatatatttgtgacatgtactgttacctatgtggcaactgtggacaggattcttcttcttctttttttttttttggtgagacggagtcttgctctgttgcccaggctggagcgcagtggcaccatcttggctcactgcaacctctacctcccgggttcaagcaattctcctgcctcaccctcccaagtagctgggactacaggtgcccaccacattcccggctaattttttgtattttagtagagatggggtttcaccatattgcccaagccggtcgcgaactcctgagctctggcaatctgcccgcctcggcctcccaaaatgctgggattacaaggtgtgagccaccgtgcctggccaggattcttctttccaggtgccacacttatgggcagcgatgccatttagcttgttttcagcctcaaggacaaacccacatatcagctttttcacttgtaaaatgggaagggtgaaaatagtaattttatgacttgaccatatagaacacatgcagcgttatcttttttggctcagtattaacgttgtctgttccagtcttcctgggtttgattcttagcctgcttcatcctctgttttgaagaggagtgtactgttgtactatttacattcaaagtgccaagtgggaatgtctgtgcagatatttatttggaatatatatttcactgggacaatgtagtagaacacagaatttggattggagaggaatgattttatacttgctacaagtaaactcttgtgttactcaagttatctttctgggtatagtttgtaaaatcttctcatttgcagaatgagaagaattttttaaaatgttgtaaaatctcccttgtcgtccaacactctcagacactttgtcacaggtgaatctccagagcttaaacatcaacaacatttgttgagcacaattcagtttgaaatgggctatactcagtttgaaagtgaaaaagagagaaatataatcataacaacagcaaagattatgtgaccagctctccgctaaacacattaccagtgttgcctcatttaatcttcaaaccagtttttgtttacacatgggaatatttaatttatttgcacatagtcacgtggataggaagtggcagaacgaggtttagaacggggttgttggagacttaccattgcatactccctagggaaagcagttgttttgggacattagagccctggtttggcccctccccaccactatcatatattgtttacccatctctcagacgtgttttttgtcctctctcgactgcattcacttcatgtatggaatgggggtattttcagctatcttactggaattcagggctgcaactagacctgaggcctgtattttctgggactctaatgataacatgtgaaataactttatttcatgcgctgtcagtcttgaatggaaatttcaacacagagactgtatattttctagatattcttcatagcccctagcactcacaggatcctgaataaatattatctaataataagaataaagagagcaaaagctgtttgattattatattaaaataatcattgaatttttacatcttaatcatggattagaaaagatagcttggagggaaaaaaacccccacaaaaacaagctaatgactgcttagcgtttctccagtgtactgtgtcacacttgacacagcctgtttatttattgtcacaacagccctgcaaaaaaaatcattcccttcagcagcatgaggttgctcattacagtaattttttttaaagaaaaccatgaaccatggtacagaagaagcatactcagaattcgttcttttggtttgtttgtttgttttgagatggaatctcgctctgtctcccaggctggagtgcagtggtgcgatctcggctcactgaaacatctgcctcccggggtcaagtgattctcttacctcagcttcccaagtagctggaattacaggcacgcgccaccacacccagctaatgtttctatttttagtagagacagggtttcgccatgttggccagactggtctcgaactcgacctcaggtgatctgtcctgccttggcccagaattcattatgtgggcttctatcccctggtgccactttgatgagagaagcagagcttgttacaggtggctattagatgatgttactgtattaccttccttattctgcacaacagcaggaagggtggctgctggaaccttctgggacataaacacatgataattcagggtctttttgctggtaatccaaaacccagttatgaaatgatttgagatatggaaacagcctggagaccttcagcagcttcgttagaccaggaagctttaaaattatctagaaaacccagggtttttattcaggtgctctcccacaaggaaaactttgtagaaagtgacgcttgtatttacaaactaagagtgaaactccagcatggcagatactgactgcaaactgctcggaggtgctaaaatattcatcctttaataatgctagactctgaaagaccccagctcttttagatttgattttataactctaagtattgcctattataattctgaatttaaacttcgtaggattggttgttttcatccgtcagggttcactttcctttcttacctctttcttttcttcttttttcctttgttcaggtttactttgtaatgatttgtccatactttttattttttaactggatggaactgccacttcaaattgatatgaaatgacagtctttagggcagtgtaaatacctggtgccataaacaggagtagtacactattcggaataaaaattattctaggagcaaactctaatgaaactgaaaccgtggcttgtggatttctccctcaccaaaccctttttttttttgaatttggcattctttcctaatctgacaaatgttatcatcccttgtatctgtcagagctattttccatttttttttcaaattattcaatcaagaaaacttccttttgttggtgggagtaaggtatgtctaattatctggtcctggaaagcagccatctgcccagtgatgaacacgggtttgtatgcagtgccagcaacatgaggatgcgtgatggatgctcacagacactccagctctccctcctccactcctgacttcttgctctcctcttgatgacttagtcagtgaatgtgaattttcagaaacattttctagactttgtttgggtagctctaccctgaataaacatatctaagttttaatattgtgttagttttctctcatactgctaataaagacataactgagactgggcaatttataaaggaaagaggtttagttgactccagttccacatggctagggagccctcacaatcatggcagaaggcaaatgaggagcaaagtcacgtcttacatgtcagcaggcaagagagactgtgtgcaggggtactctcctttataaaaccgtcagatctcgtgagacgtattcatattatgagaacagcacaggaaagacccacccccatgattcaattacctcccaccatgtccctcccacgacatttgggaattatgggagctacaattcaagatgagatttgggtggggacacagtcaaaccatatcaaatatcttccactataatataaattatactctaggtgaatggtgtttgcagatatttttggaaaccagtggtatattataggatactgctagaaaaatgtctagatatttaaaataatttgtcattgaggaacaaaaagaatataagtcaaagagacatagactcataaggtggttaaaatctcaggaattgttcatctagccacttatttgaacagaggaaataaaaccattgttatcagtgaagacaatgatcagccataagtagacatgtaaaataacagctgtttaaactaattcctttccaagtttagtgagcatagggattacctggggattgttaaaatgcagatcgtgattcaatacatcaggatgggttctgaaaatctgcagttctgacaaggtggcaaggaatactgatgatgctggtgggttgaggaccagactccaagtaatgaggatataaaaagcttatttatcacataaaatgtagaggtggaaagttcagggctggtaaggcaactccgcaagttattcaaggtcccacctcctttcactttcagatttcaccatctttagggtgtggtcctcattcttaccgttcattatgtagcgccagctatcatatctatctatgtcccacgcagcaggacagaagaaatgggatggtaggaggagcatgggaaccataggaacatgccagtgtctctcaaggaagatttctgggatctaccatatgacaaatttcaaaccttttctattagccagaacctagtcacctgaccacatccaggtgagaggcaagctgggaaatgttacttttaaactgagtggctatgtgcctaactgaaagtccccacactctattgggaaggggcgtgtgaggcatggaaatggggcatgtctagcagtccatgccacagatgcggatgtctgacacaagaagtggtttgccaaagatcacagaaaaattacagttcatagattaattataaccagtacatgtatggacattctcagtttatgtgtggtgctgttttatgtcataggcttatttcattttcataactattttacactattatgagcttcttttttggttgtggaaactgaggttcaaaatggttgagggacttcattgatcataaagcctacccttactactctctttataattgcatattcctgtctctcccttctctctccctccttcattcctgattcctcttaccagattctatattgttctttgttcccttcactcatcacctttcaacattctatatatttttcttatttagcatgtcaattgcttattgtcagtctccttgtgttagaaggtgagctccgtgagacctttgttttgtttgccagtgcatcccaagcacccatttagtatttggcacatgacggaatgctcagtacatagttttttaaatgaaggaataatgccactaggtatcaaagtccgccttggaattatgtctgttatcttcaaccctaatgctatacgccttctccatcagggcttctgctaatgttttagactctggaactcctgtgtttgcctcagaaatgtgctcacacttaaacatattgatttcctccttgtcttcgtgacattcatttaatgttgctagccaacttaaccagtttgctcttaccttcagttctctctttatctcagtcccaggttaatatttcctgaggacccaagcataccactagaaaaacaaactttagcaaaactaccaaaattaacgtcaaaccagcgttcctgtttgacttagtctctagcctcaggcttagataggactactagcacacgcagatgggacagtttctaagtggcctgatccgcattggtttctagtttggaatgtaaaaggggactggttctggtctcagccaaatctcaagactctcacctccaccctccgccctgtttacagtaatagaattaatataaaatgtagcacaatataatataatagcatttaatattattatgcttctgtttagaaacctgttatgacaattggttgatttcattcagttaactctatttctatgtctttcttttgtgaagattgttaattttctgatgggaattttctgatacaggttcagctaatacgtactgagctcgttttgcatgctaggacttttaactctcacacagcactgtaagataggcagggtgtacatgcagagactagtttaagagaagcattttgtccaaggccatatggcaactaagtggcacatggaaaataattaactatggaaagtaattccactttaggtctcctaaaattcaaatctttgctctttcttttctatacctgagtttcctgattttttatacttatatgtctgtctaccccagcacctagcatagtgctttgcgcatagcaggttctcaataaatatttaatgaatacaaatatatgaagagcttttctgtggaaaatattctgctttgaatgtgtgaggatacatttgggacaaacatcctagctctatagtcaggcagctttttttttttgtgctaccactcaggcaaaagtaagtcaattaatctctctgtctccgtttcctggcatgtaatgtgggaatgggcatgaaagccctagagtgtgttgtgagattaattagttaaaacgtataccctgctatataaatgctaattgctgtcaggagcgtgggttggatcttccagtgacttggctttgcaaagctttgcacatttccattagtcctctgtgccaccaagtctcagccttaagaaacccttttggctgagaggaatgatgactttgtggttctcccatgttgagaggccaatttagagaggacttccactgtggagtaaactgaataagaagggacattataaacaaaaaaggaattcttgtgctagtaatttgctaaattccctttgctgttattagagacaaatgtatttgcataacagccttttcctgtcttttctgaggctggtgcctgcagtgaatcatataattaatttggtattacatgacactccagcctgttgccatagattttatttttatttgttcattgaataatataaaaagctctgacaaaatgcgctcaggtggctgtctagagaacttaaaaactcacagaactaatttcaaatgggcaaatatcccaaagaaaaagctcaataataataatgtttatgaatgctaatacatatattttcaggctctgtggtacaggaggctgactcactttacacacatattcatttggtccatgaaacatcatgtaagggagatacatggcaggtataattatttcctttccctttaaaaatgtattgaatttaattgaagacatattaagccgatggattgggccagaaatcttggtgattgacttgtattcaaattttagtatgtaaggaacaaatgcttttttaaaaagtgtctggtcttgatttattaacttatgttatgaaaggaaaattctaccttcctttttttgttaatcaagataggcagtactagttgctatcacaaatctcagtgacttaagacaatagagatttatttttcactcatgtcacagccgcttgaaagtcaagtggcattcctgaacagctctgctctgagcagtggcaggaatccagattcctcccatcctgtgatgctaccttttcaacagtttctggacttcagggcctccatttcagggaaagagagcatcagagattatgctggggatttcaggctctacagcatttctgcccacatttcactggccagaggaaattcacatggccccaacccaattaccaaagagaagtagttttcacatgagtcaaggagaacagaattaatgagcatatagacagtctctaccatagtctgttctcgtgatcactaaaaatccattttataattcctcctaaattggtctgagtatatgcttgccgttaaaatgttatgttagctctccttttttatttcctctttcccaatcggcattctcctactttacaaaagaaaaatctacatgtcgctcatcatctatcttactattaattattgcccagggctataaagattttcagggtctaacatgacacttattttattggtgtcagaatgtctccttaataagggcactgttaaaccccagcaggccttcctttttctctccaatttaccaatgtttctattaagagtgaatcatgacatcagaatatgatctgtggcccaagttggagtgatctgaattgatacacattgtagagtgggttataggaaagatactaatttccatttaatagtctttcgtctaccatcatctaattgcagtccaaaaagtgcagtcttcagggagatgcttttgcaaaacacgtgaagaatatctgtaggaaataccaatggcagtgacatcttattttatctagacaacaaacagtataatgaaattgcagactccatttgctatccaactgttttcttcctctttttttttctatatactttatcattcaaagtgaaatgactgtcaagccaatacataacaacacaatttttggaaataaaatataaaatcaaaaatttttctaacagaaagtagttatgataaggatggtttgacatagaatgggtttgccaactgtattacctagtggatattttcttccttctttcctttcttccttttattctaattattattttaattaatttgaaagcaaattatgcacagatttttaaggtcaatatattaaaaaaaatcaaaataattatatactttctgccttaactatcctcacttttactaattacccttctcagagacaacaacttggatgtcttatttatctcttctaatatttcccatctatattttgctaacctatttgtatacattgttatcttttgtgtagtcaacccaaggcattatcttttcacttttttcattatagtaaatgaggataatctcactgaaactgctatcccttctacccattcttctctatatttcatatttggtcgagtcaataatcatttcattaatatgttttcacatatttatgaactataattctattacgtctcttagtttttgaagttattaactgcattgcttttcatatgcttattttaatttgtatgtttttgtaaccatttttatagctttcaattgcctttcagcataatttttcacatttttcacactgttaatgacatcagataatctgtcagttgtgattattttttcccttattggaggtttccaatccctactacctatactggttcgttaccaagccctggtgcataaattttatccttgggtctcgttcactgtcattctgaggatccctttcctctcttgaattagaatccctattcccaatcctaggttttctctattattgttttattctctcatttttgtggcacacatcccccgaagctccctgataaggaggacatggtaaataaattgtggagtctttacgtgtctgcatttgtcaccttcacacttgattgttttattatgtttaggttctaggttggaaatacttttccttcagatgcatcgcttcattatcttctagtttccagtcttgtgtttgggagttcccaaaccattctcattcctaatatttcgtaaagtgactttttttttttcctttcctttcttactccttggcagtttgcagaatcctctctttctctgcaattgttttgaaatatttatgtggtgtgagtctatttctatccattattctggggcaattgataggtccttagaaggttgtatacttcagttctcagattttgttttttttctgtgaattatttaattgagaactttcttggtattttgggtttttttttttttttgaaaggtgtggtgcagagagttctcttattgagtgattgagattcctgaagtgggcttctaactttcttatctattttctatttctttttctttctactctgctttttaggaaatctttaaatttaacatctaaaaaaaaatctattaaagttttttgttttagtgggcttttgttctctgaatattgcttggttatagcatttgttcctgcttcatggatgaaacaggttccttatcgctctgagaatgttgatagtattttttacatgtttacttttccttgaataatttgattttctccaagttccttttacttttttttttctgacattacattttgtggtagaggtttttctcagatgatctgctcagatttaagaagaagtgattaagaagctgattggaaattctaaatgtgagtgtgaagccgtgatgctcgttaaacttgagcttttctgttggatgatgtggctgcacaattttctaaagagcttctgatagtaagattgtcatatatttcttcttaaactggccagattttccacggaagattctttccttctcttctgtggagagtaaatgtctgactgccctcatccttggagctgagtgaagaaaactgttcagtgctagaagagtgggcttggaacaaagcatgtaacttttttatatagctgtcattctgtcttctttcttttaccattcttcccatatcttcggttttgagatacctgactgcatgtgccaggatagattattgatattggtaataagcaaatccaaatcatctctgccttcaaagaacaaagttgtgtggtatgccatccatcaaagtacccaacctaagggagcctctgtctctgtgctttcatatttgccaaggcagaagaaaagggaattttgtaaaatataccccatccaaaacatccacaagtaggactgactacatcttcttggtcaaagtaagtcacatggccgctccttacttcagaggtgtggaaatgtacaatcttatactcggaggagaacccataaatagtgggtgaacagcactaatgactctttatcttgatgctgataattcctgggtcttttcagcaccctgaactacagattggtttgttctccagttctctgctgctggtttaggatttgtctttttaggtgtgttaagtctgttaccacttgtccatgttggtatcactattgtcttttctcctactcttgcagttacttgggattatgtattaaacattattttaattttcttttcttttctttttttgaaacagagtcttgctctctcacccaggctggagtgcagtggcacgatctcagctcactgcaacctctgcctcccgggttcaagcaagtctcctgcctcagctttccgagcagctggaattacaggcctctgccaccatgcctggctaatttttgtatttttagtagagatggagtttcgccatgttggccaggctggtctcgaactcctgacctcaggtgatccgccccctcggcctcctaaagtgttggaattacaggcgtgagccaccatgcccagccaaaactttggttatacttttatataaactgaataagcgaactctgcaactttgcaaatattttcaaagaatgtgatactttataaaatacattgtgttacaagtgtgcattgatgtgaacaacactgatttttccaattatttctctgtatgttttttaaaagttgcttctaactaaaaacatagcaacaaatagtcatttgttgagtcttggaaaaactagttgttaaatttccccgagctttattacttacctgacaaatccttttgcaagtcagaaagcttcagattcttcacttttatcaaaattagaataatgacaagtgagttgttttgccagttatccactgctgcaaaaacggtgccttgcaaagaagcacaaatttaaatgaccaaacttcattttatttatttcacttgtatttttgcttctgagtctgtatcttgtgcggctcagctcgtccaggccggacttgctcttgtacctttggtcagttgtggaaagccagatagccatacttctggaggtgggccagctgccagctggggtgtctcagctgtcctctctgtggtctcttatttattaatatgcttttgtggacttgttctcatagtgacaacagagttccaagagaaaaagcaaaatcttttaactcttaagtttagatcgtcacacaccacacaatcacttttgctgcattttgtttgccagtagaactcacaaggacagcccagatttgatggctggtgagatagactcttgattggaaaacttacagtttcaaattgcagaggatgtggagataggggaaagggaaaactagggctgtttttgctgactctgtattccagagttttcaaatgatcgttaaaaataatgtttgatgataaaaatataaaatgggtatacagctcagaaagaatttaaagaattgagtgaccttgtggaactaagctcctttagttccttactgtaaacaaattttcccagttctcacgtgtaagcaaacaattttcaactagtacctaaaaactctcattcaaaaatagcccttctatattactaagaaatgatttccaatgcaagctttacattttataatcattaattacttataaaatgaaaacatattatttaaatttataagacatttcaaaaatcttttaacacttagcactttacatattacacaaaagaataaaatgatgaaaaataaagcataaactatcaaacataagaatatattccattaaagtaaatttgcatgtggagatagtggaattaatgtaagttcaaggaaaaaaagaaactatggaatttataatggttaaagaaagcttttttacatgtttttaggttggatattggtgtatggcaaatcactattccattggatgtaattaaaagaatgatgtaactcttttctttcaaaatggcattacttatgacactaaatatatcctttccaattatacttggcatgagaagttttagatgtcaatggaaacgtagggaagattacagagttaaaaaaatacatacataagcatgtgtatgtgcatatgttagggacatgaggaaaaaactactttaaggtgatggttttgtggtccgcaggactccatcaccctgacctctgttcactcttcatctggtgacttctagagccctccattcagatatcactctaaagaaaataaatattttcttgttttcttaaaataaagaaaaaattctttaaaagaagtttgtttttttttctgagtagatgagtgattacttttcattataaagaataaattatagaagccattacgcacaaggacagtgcagattggaggggtggtaagatagactcttgattggaaaactcacagtttcaaattgcagaggatgtggatacaggggaaagagaaaactagggctgtttttgcagactgtattccagacttttcaagtgatcgttaaaaataatgtttgatgataaaaatataaaatgggtatgcagctcagaaggaatttaaagaattgagtgaccttgtagaactaagctccttttttatttgactctgtcattgaaactgtagcacctttagttctgaatgagtattccaccaaggagtattactgagatctcttgatttcttgaggtctactgtcctgctgtccaataaagtagacagtagacatatgtggctagtccagattgagatgtaagtgaaaaatacattgaattttgaagatgtaccacagaaaaagaatgtaaatgtaaaatagctcatttttttatattttggatatattgggtttaacaaaatattaaaattaatttcgtctgctttgttttacttttttagtgtggtaactgaaatgtctaaaatcacgtatgtgtgttgcattataatttctattggacattgcagatctagcccatgaatcagaagatctagagcaaactgggagtcctttctcccatttgcccaaggattgtctttttcagttacaatttcctccttaaaccattctctgttccacaaagtgaaaaaacacttgatgtctttcttaggtgaaactttctcccataccttgcagggcttaacagggtcaagctatcagatcaaatcattattcaagagatactcagaaaataataaataatggggaacagcagtttcttcacaccaaaggtgcctactgtatgcaattattagagggaggctggaagatgaccagagaaagaggttctggaaaagaccgggtgaactgaggagaaggtgtgttcttttgaggcctttgttgtaaaatgactcatctgcccctttctttcttttttgattattccagaacgctgcgatgactggggactagacaccatgaggcaaatccaagtgtttgaagatgagccagctcgcatcaagtgcccactctttgaacacttcttgaaattcaactacagcacagcccattcagctggccttactctgatctggtattggactaggcaggaccgggaccttgaggagccaattaacttccgcctccccgagaaccgcattagtaaggagaaagatgtgctgtggttccggcccactctcctcaatgacactggcaactatacctgcatgttaaggtagcctgattcttggcagtggctttctcttttccctttagtttctgggctcttttccggatgatccgtgtgctaggaagctggggagaagtcggaagcatttagatagagtttagtgaggtaattgtctgcagcttagctgaaggggtctgaaggaggtatgcagagaaattggttgtggcccttagaatgttctccagaggtagttccttcccagaccctgagacatatcaaagttgtccgaaagtggagccttgttattaatcccctctcaccacaccggttcctgcctgcctttatgccccacctggagacatccatttctccagacattgaacagggcagagaatagagcccatttgtatctgtttttcttggcatctttcaaagtacttggcacagaagagaaactcaggtgcattgtgtgatgcacaatgcctcccaaatatgtgtgatgtgatgcctcccaaatattattttactttttgagtgtggcaactgaaatgtcgaaaattacatatgtggttcgcattatcatttctgtcagacactgcacatctagcccccaaatcagaagacctagaacgaactgggagtcctctctcccatttgtccaaggtttgccttttcagttacaatttcctccttagaattttgtctgtcataatattctcccaaatattattttgggaggcatgacatatatgtatgacaatgctttttaaacttctaccaactttcccctaagaagcaagagaataccatatctctggcaatctaaggatataatccaaacaatttaccatgactgtaaaatttcttttcaatccacttttttttcccttgaaagttttgtagattttatattttactcttcagtattcctcttttttttttctgcattaatgttgtttttggggaaaaaaacaaaaaaacaaaacaaaacaaaacaaacaacttctaaaaactgaggcctctccacagaatagcccttttcagggttaattatttggttactttttactcacagtcactttttagctgccaggcttgcctttgttttctaaactcccatccgggttatttttttttcttttaacgacttcctgctatttaaccggtgtgtggctttgctagggctgcaatgacaaaataccacagtgtgggtgactttaacaaacaaaattaccttctcacagttctggaggctggaagtccaagatcagggtgttggcagggttgatttcattcttgatgcctctctccttggcttgtatatggccatcttctctccttgtctttacatggtcttcctctgtgtgtttgtgtcttaatctcgtcttctgataaggatgctagtcatatgggattaaagaccccctttatgacctcatttgagctcagttatgtctttaaatgttctgttttcaaataaagtcacattctaatgtactgtgaattaggaccttagcatataaattggggttgggtgacacaactcagtccataacaataaataatcacaaatgttttttctctcatggagagtaactactccctgatggaaaactatgactatgctttggtaaatgtaagctatgttatgattatgtgaaaaaagatctcttttctatcacagaaaagcctttggatcactgtgttcttgggggttgcaggtaagggggatccctgtagcctctgaaggtccttctgaggctttcattggacacttgaattttaatggagtggactttagactggtatatgggtttctgaggatcctgaaatactcatgttgtcattatttatgttctaatacaacttggtagaagttaaagcagattatagtggaaagagcattaggagaagacagagaaaccaggccatcacttccactctgccactacttagctggtgaccttaggcaagtcctgtccatgtctgagagctgtggtatctacgtccacataggaagagagttggcatacatgcttgatgagctcctttttttctttgataactgttcatctgttaacatttcccaacgggaagaagtcatcaggagctttctgtttaactatggtctccactgtgtatcttagtgcttcaatatcagttttactttttccttaattacttactacttgcctgtagatcttccacaaacttttctaatcttcttttacattataggagtagagctgcatgactattaagacctgcatatacctttaatgttatttatcaactttcagattgtcacctcttcagtttacttctctatcttccatgttcctaaagcaaatctagaattgaaattgtctggtaggagcactactaggtttcctgttttactgaggaaatgtcgaatctgagaatgaccttaaactgaaacatgtagaaccataggcctgaatgtctttaaggccataaagttagtttcgtctttcagtattttatttatattcttgccccaatactgttcaactttgggagctaaaaaaaagtcggttgaaccactgttcttcatattttttaaaatcagaaaatatatccttaaacttaaatttactttctataacttccacctatagaatctgtcttccacgtggcagatgttttgttatttgtaggtaggggtcatgcctaccactcccccttgccaccttctgagcgttgtcacaagtcatctttaacacccctccctccctctttgagagtgcataccccaccccttccactatatttagtctttattcataagtcattttggtaccagataagccaaataggtgttatgtgatgcctcccaaatgttatttagacaaaaatcacagaaatggctacacatagactccttatcccatcactgtaaaaaattagttgtttttattattgtatgttctttttcatgttttcctatatttagacacaagttttacatccattccatttatttaataacaaatatttatttagcagttactgaaagttaagacactgtactagatgcaatttatgtaataaaaaacataaatagcgttgtgggacttatattttacagaggataagcgtacgtatctataacataacaatctaattttgagctataacaaatttaataaaggaaatgtccaaggtgctcaataaatgacagatcaaatttagatatgaggtgggaaaagataacagagaaggcctgcatgtgaaatggagggggtgggggaagtaagccctccaggcagacggaacaacgtgtgtgaacattatagcaccaatgtaattccccagtcatcctaaggaattgttatgtgtttgtttttttccttcatgcctgattgtttgtatacattctcacaacaacttggaatgattgtaccacaggtttcttgataatattccatttgtcacattttcttctattgattttaatgttttccttgccgatatggctctggatgggccattttgactatttgctgtctctattcctccttttctatcgttctatcatgtgacaaaatatccagacataggattgctagggcaaaaacaaaggcgttttatgatcctgaaaacatagtttttcccaaaggttgcttataccattattgactctgcataaatatgccattcatgcctctgccttaccagcactgagcattattgagaatgttttaggtgttacatatatacacagttatattttgctgtgttgaacagcagaacaggggatatgttctgagaaatatttgttagctgatttttgtcattgtatgaccatcatagagtatagttacatgaacttggatggtagagcctactacacacctaggctatatggtatagtctgttactcctaggctaccaacctgtatagcaggttgtggtactgaatactgtaggcaattatcacacagtggtaaggatttgtgtacctaatctgtctaaatatagaaaagacacagttaacatacaatataaaagatgataaaaacggtacacctatgtagggcacttatcatggatagagcttgtaggactggaagttgttctgggagagtaggtgagtgagcagtgaatgaatgtgaaagcccaggacattactatacacttttatttgtctgacggtgcataggtttgtttataccagcatcaccaaaaacgtgaataatatgttgccctatgacattacaatgacgattacatcaataaacaatagaaattcttgagctctattaaaattttatgaaaccaccatcacatatgtaatccatcattaactgaaatgtcatcgtgtgacacatgactatttatatacactgacaaacacacacaggatcacatctgaaaatatactttagtacattaatagtagttaattaattgtgcctgtttttttattctgtgatgtcaattcgtgtaggaaatgcctccactaccattttatctcttacatgaacttacatgtataaatgatgtctccgtatgtagcctggcttcacttagttcatttgaatgtggttgctctatgaaatcaaatgcaaatactacccattcattgtatatttcttttttcaggaacactacatattgcagcaaagttgcatttcccttggaagttgttcaaaaagacagctgtttcaattcccccatgaaactcccagtgcataaactgtatatagaatatggcattcagaggatcacttgtccaaatgtagatggatattttccttccagtgtcaaaccgactatcacttggtatatggtaaggaaaattagactacattttattctctctaatggcttataaaatgataatgcttatttgctgagttatatttataagcaaaggtgtttctcttcagattatctgatctattccgtaatagctttatggaagtatttcagcacgtcctcattttgtaccattttaaaggaagtggtgcacagtactttgtctcaggccactatttctgaaattattctaactagaataccaaaactaccttatttctgttaacttcatgtgaaatacattttaagaaatgctgcccacttctagttcctgcttagtgaagtcataagctgttaattcttgtggtgaatttcaattccttgattaatcagtactgcattttattatttatgtgtgtttttttctttgccctcatttgtgagcactgtccatctatggtcttttccacatccaagggatttggaaaatgtttcatcaaaatataaaagtgttggaaggtagcgcttgtagcagcagcatagcttttgtatcacttcaagtctccacatacaccaaagccgaaaccccacggccagaatttgcaacataactcagtgactagttatccataggaaccacctttgataaagttaactgagacaagccaccaacagcctaagcccatatgggatcagtgtttgtggggaaggaagcagatggaagtaacgtggtgtctgtcagacttgacaacaggagaacgccaaaagagccaacaggtactcactggaaagtgtgatgagccaacgtgagaccaggagctgaaattgggagaggttttgctctctaataaggggtagtgcaagagacctataagaagaagctctgaaggggtgggaaaagttgtagttcctcacaactctgaaatatgaccagccacgttgaggagaagctactgtgagtagaatcaaaagtaaactggatgaggacaatatataggaaggaaagagaaggactggtgaaaaatggatcaggagaacaaagccaggacgtcttaagaccaagacaccattgttttcaaaagatatcttggtgaagttagaaaatccttttctattttaaaattcagaaaaaactactatttcctaagtgagctaaatgacattttaaaatgatacaagctgtgaaagaataataagaattagaaatatccaaaaattatatatattatataactccatacaaacttagaagaaaataaatcattttagaaatgaagataatctaagaggaagatcacagaataaaaaacacaatagataataccttaagattagtagaaggtgaaagggagaaaaaattaaaattaaaaaaatgacaaatacaataagaaaattagaatggctgtaagaatatcagataaagtagacagtgaggattaccagagataaagatgacctttcataataataaaaggatcactttatcagcgaaacataaaaataacaaaagcttgtgtgcttaataacaatgcttcaaaaacatgcagcaaaatttggcagaactcccgagagaaataaaaaattccacaaacacaatttgttgtaaatttcaaaagctgaacattttaaattctgtctctgcttaagttgttaatgatacaatttgggagtcaacttgaagagtcttctgttggccaaagatgaacaatttgaaccgaaataatttgaacctaattgcaatggtttaaatcctatgaagtcagtttaaatttataagtttataatgacatttcacaaaatttaatgggttacatttggatgatgataggaaatcagtttattatcttgaaaactggtaaaggagaataatcaagtattcattctggttttcctagaagacatgtaacattgggtaatgaagtgttgtagagaagtgtgttttgtaaagtgtttctaatagtaaatgaaaatttaatgatccaattagaattatcatcaccttgcaactctcaatagattaataaatctaggcatctaagcatcaatgactgctaacatcacaagaggaaaaaccatcagacatgtttcttctgataaaagaagaaaatattacatattgattcatattaccaaattaattaaacctgagtcggattaagcctttggatcccactgtcattttgcaggagatatataaataacatagaaatacattgaactgcagcatgaatatgtcatccataaaatccagactatgtgaaactctatgggccagatgtgctgggtttttcaaaagataaattgtaagaaaaggaatgtcatgaagagggactgtatagattaaaagaaacatataagacatttaaaaagtagatagcactgtagcatctaagcatgcatatataggtgaaaagtatataaataaaaacaaggaagtgattttactataaaagtatagatagtgcctactttggagggtagtaaaggaggtgtgattgacatgggccgtgacgaaggccttcaggagggactggcaaagttcctggacctgactgatggttacaaaggcctttgctttataataactcattaactcttagatgtgttttgcatggtttttttgtatgtgctttattttacaataaaatgactaagagggatggagggagagagagaagaaaggtagaaaaggagtgaggaagagaaagagatgcagagactgatttaagagatttaaccaccaattgcaatgaatcaactttagttggatctttttcatttgaaaaaaactataaagcaaattatgaaaagatcagggaatttggaacatacaatactaatgttactaataaattattactttttaaacttgataatggtactgtagttatgcttgcagaaggagttttcttttttggagatactcaaatattgtttaaaataaaattatatgatgtctgtgatttgcctcaaaataatcttggggtgcagtgagtagctgtgcatgaaataagacatagtctcaattaatacttgttgaggctagtaaagatacaggagctcgttgtcctctctctgattataatttttcatggtaaaaaacctaaaagatggttaaaaaataatattaacagttttacatcaataagtgtaatataccttccagttaaaaaaaaaagtttatttaccgtgcaatctaggttttaatctcgaaccttatttgattttttagttttgttcccatacacatcctgccgttttctcatctccttttttcctcatgcatttcctctgcctagaatgtcctccctttagaacagaccaaattgtaccacctttattaattgttccttgttccctccagctggaaatcatatttctctcatgtattcctgtttatttatacctgtttcaatattatttttcacttctttatttttttagtcattcattcatgactacagatagtcctcgatttactatggtttgacttaagatttttcaacttgatcatgggtttattgggataaaacctcatggtatgtcaagtagcttcttatgatttatgatggggctatggtttctactgaatttttatcactttcacattatcataaagtggaaaaatcataaataaaaccgtcataagttggggaccgtctgctgtgttgtgagaattaaatgcatttttgacttaaccatatttttgacttatgataggtttgttggtatgtaactttcatcataagttaaggaatatctgtatactagctgaagattaactgtgatcagtgcaatatgccagggggttgagggaacaccataatgaataaaatatatgcccagagctgtgtagtcccaaatgacctcataatttaatacaaataactttgtaaatacaaagaatttctactcttatcaaaatgtaaacttctaagtttcataagagtgacaaggagaaaatactgttggttttaaggagagagagatatgtatcctagaagacagcatatttcttgagggcaaagctatgtaatgtcttactctgcatctccagatttctggttttcacgaaaggatgacatggtgctattaaccaaggtatgaagtaacagaggagaagcaggtttagggagtaagtaatgggttaggtaatgccatattaagttagttgctgatgtctgtgagacatctagctggcgggtggcagtgactagcaggtagtggttacgtgattatgagtctggagcttaggagaaaaatcagagctaaagacagaaaattgggtgcattcatgtgatagttgaagcacttaagaagactaaataaagtgagaagagaactgagctaatgccatactctggagatactattcatgggtaaatggagacataaattctgagaaggagacagaaaaagtcacagctgtaaaacaattaccatggccaatatccaaccatgcacaggtgactaaaaaaggcaaacaacatggccaatatggtgaaacccccatctctactaaaaatacaaaaactagccgggcatggtggcgcacacctgtagtcccagctactccggaggctgaggcaggagaatagcttgaacctacaaggtggaggttgcagtgagctgagatcgtgccactgcactccagcctgggcaatggagggagactccatttcaaaaaaaaaaagacaacaaccagtcatgttttctcttatttgattaagaagattgctaataatttctgatatattgcttcctgttcctctacctttgggtaatcaactgacacctttaatcctaagacttctgccatcttggaaacaaaacaaaggttcttggtcactgcatcctcctgtctctgtacagcagtgctaactttgccttctattttctgccttttacaatcatccccaagcatctacccggatgtcttggtccttcttcagcaattcttttttagttgttaccaacagaggttcctacatctgttggttcctacctctatggatctatcttttaatcctcatagacttatttgcattactaaaagagacatggtaaagatgttctcttttagtaatgcaactaagtctatgaggattaaaagatagatccataataataagtttcaggaaatttgctttcccgttatctgaaagatgaaagctgctaatcttaagaaagaaagaggaaactaatatttcttacatttcagtaatcacacggcagcgtgctgtgtgctttatgttcatatgtaacaccagctctgcaagggagataccatattttgacagattaggaaatggcgattcagagagataaacaataacagctaacatttactgaacacacgtattgttccaaacgcttgattttacttaattctgtcaacatccttatgaaataggctgtcatgttttccccatgttatcgttgaggaaccaaggtatagcgtggttgagaaatatttccaaggccacagaactaggagctaagattctaacctatgtaatgtaatgtgtcaggaaaccacacttttacactttcatatataatttactcaaaacaatgcagctactgatgggagagtctgggatttcaggccagttctgtgtgattacaaaaactctactctctagaactgatgtaaggagggtggtccagcctttacttttggagcttaggacattttggaagggcagggtgatctttgaacacatactggggtgtggactggaccgtgggacgtaggtgaacctgtggatagagggccctgagaaatcggaggcatctcagacaaactgagattacaggaaacagaaaaccaaatgtttacatttcagaattgctgaagaaatgggataggattggattgtcctcctccacatgccttctctttctcctcttttttttttctgcatggcggaaaaaaattctgccatgaattcacaattctctaattcaacattaggtattctagtttaactcctgtgagttaaactgatgttcagcaaatatttgttgaataagccaggttttgtaactagtctggaaagcaaaccatagtttgtaagtgatttacagaatttcaaacagctggcttataaaacaaattctgaaatataccatgtgtataaatgggagactgccttgtttattcacataggaacctccaaacatatagaagtaaagacacaggtaatgcagtccttttgttgttgcttttgttactgatgagattaatttagagtctttggcaggccatcctaactttcatattactgtattaattctcttccttatagtttgatatttaaaactttatcttttagagatgcttataaaagcatagacaattttctcaccgaggatcaaaagaaccattttattgggtgttttgtagattacatttatgacagctgctgaactactctcacctgctatttatcagaatagataatgacttttctattatctttgtggttgtaactttccacaaagctagttttccttgtagccacagtgattactaaaattgatatattacctccacttttcatttttattgtggtcaagcattttttataactatctcttagaaaataggaaaatatttgctcttccagactaagtgctattaggaaagaacatttctgaaaacgtgcctggcttggccttcttgttggcatagagatattgttgagaagttagttcaaggtctgtgtagtaagccttattttttaaatgcctgcttctatttgatttgacaacatagattggttctttaactcttttctttacctacacttcctatatagtgattggattttcaacctttagtgtgagagagtatgtaccatattttctttcagagctatacacatataattctatatgtgtacatatatgcatatacagataacatttgacgtaaggtttagggcctctgaggactcaagattcatgacttaaacacaaagccaaattcaaatagctatgaagtcttgaagccacttcaggccatataaatcacctactctgtacttcgatagcacttcattcatatcttgtctttattattctagagattttctcttttttctgtagtaagtagtgaccactcttttcctgtctctttctctttcccttcaataccaagcacacagcataaaactgagctaactatattgtacttagaaattgattaaataattgaatgaattagcctgccctgtaaaattccagagaataagcaccatttgtggtttttttttttctggcaattgtatagccagctcctaacccagtgcctggcccataggagggactttgtaaatatttgttgtgtaatcattgcatgacttaattctgttaattggaagtgactagtttatctaactcttctaagacttcatagcaaagtatgtgttttataccaactttatcttgaatgcaaaaacttcagtagatactactaacagttcaaaccttgtatctcaattaaactctttgtatctttacatctactttccctttccatcctacaacccaccatccaatgtcttatattccaaatactcatcagcacttatacactcgatgagccctcagctccatgccttttgggtcttggcttctctcattcatacctttgatcaggcaacactaacgtgtcgagcatttaccaagcaccaagtattgagcaagtttccgaccacgcagatatggaacttaaaaaccccactgtccctcatacaagttaattttccaaaggaggaactctgcatgaaaacagagcattataataatgtagtttaagtactaacagtcagggaaaaaaattaagacaatacaggtgagttcttcacgctttttcctgtgcctgaagtgtctacttcccatgtctaccttcttcctcaacagatgttaatattcttatcatttaagaaccagcccaaatctttcttcattaagtttttctaagttgttttgtttttatttcatactcccttgaccctaaatgccttttattgtgtttgttgcaatccttcattagaccatgaataactataagttagaattgtatcatttccattttggtgccttcacacagttctttacacattgttggtttcttgaatggaaacacttgttcttacttcatcatgacattcctccactgcacccttcccctccccacatgattcgtttcagttgaaagatcccaaagtcatttcttgtgttgttctttacctatatgttgtggtcggttgccacagcaaccatagcatggttgaaaaatcgctcttctatttaacttctctcttttgaattcagaatgaggaactaatgggtcaactaggattgtttgtcttctagtcagacaagtgtttgctttattgtggaaattcacttactgttcactcatttcttatattttaaagcaagtttcctattcttggagaatctaaatctttttttatgtttgttttcttctggattccaaataaatggttttgaaatcattataacattttcaggttttatttttatcaacagtttattatgtttaaaattatcctatgtgtctcaggtacatgtgttgtgaagggtctagagacagagttgctgataagaaagagagagctaaccagacacacagcaggttaatgttcatagacatttgtagtgtaacaatgccctgaattaccctcacacacgtattagaatgtaaaatattccctttatttctaaaatgttttaggcctaatagctttgaaacagctataaaaagtttctttcatcacattcttaaggaaatactgttgacaagttcagtaaaaataattgacttctcatcctcaaaagtgtgcttcctcagtttaccactgattgcaggaattagcctgttttaagtgatagagccacatcacgcttttcactcaggctggctccagggatggcacaggttcagggctgctatatggaatgaagagacactatcaggtgaaattaaaagcaaggactttgaaacaagtagatctgaattcaaattccagctttaacactgtctggtggtatgacattgacagttacttaacgtttctaggccttgttcattcatctataaaacggaggtaaaagcattacaaactttacatgtttggaataaggatcagacgagacagagtatatgttaagtgcatgtctcagtataattttttatagcctcaactcactgctgaggagaggtattcattcttagttaagaagctgatgaaagaccgttattcggctttctggaaaactgaatttcagctctctactgtgttatctagaatatctctgtctcattttttccgtctataaaattacagcgtatttagtctgatctgtctacttcacaggagtttcagaatagctaagctaacaaatgagggggaaatacctttgaactgtttaaatgaaaagtaccacaaaaataaaatagttctattgatactgtaaactcaattcaaaccaaatctgacataaacttataagaatacaggcctttgagaccttatcctttgtgatatcctaaggatattgaaatcgtttgctgacctgacaagtgtctacaagtattgcttatcttacaggagaagctgcgttgaaaaaaatacgttacccaagcttatagtagcttcctcttgatgatcttttccatgaaatggaagttcaatgctgttcttaaaatacacatttcctgtgacaaagcattacaaaatgtgcctcaatgtaactgtcatatttcaaagtacatgctccaggaattgaagaaaaccttaatcatacaaacattaaagatgaaatatgtgaataaaaaaaattgaagttacaagctagtagtagactcccagaaatttaaagatgtaaaaagccttagagataacctaatctttttgtcataggtgacttattgatatttaaaagaaaaacaaaagcttttctaaaagtaaatgttcaacatatatttttgtcacagatagtgtattgattttttttctcaaaaacagcaaaaagtaataatttagccaaatagtgagactgagaatttgaaacaggattctagatatgttgaatgagatagttgtggactgagatagttcaatttctcaattttaaatgtcaacagttatatgcaaatgtgaattaggagcagaaatacattcctagatcttgatcaggcccatgaagatattttatttttagtttctgaaatctgtgatactcagttataaaaatgggataaagttggtggctcatgcctgtaatgctaacactttgggaggcccaggcaggcggatcacgaggtcaggagttcaagaccagcctggacaggatggtgtaaccccatctgtaccaaaattacaaaaattagccaggcatggtggcgcgcacctgtactcccagcttctcaggagactgaggcaggagaagtgcttgaacccagaagactgaggttgcaatgagctgagatcacgccactgcactccagcctgggtcacagactgatgagaccctatctcaaaaaaaaaaaaaagtaataaaagaaaaatgcaaaacagtttggaaatatctgatacagggaaacaacagggtgattaaaaatgccaatcagacatctaaattggggcctagattatcagacggagtgactggagtcccaaattaatataatcagtgaagaaatattataaaaagaaaaagaattgctttctaaatagcaggtcttgcagttgctcaagtttccttagtcattatttcaaaactgtaactttgctttactatcaacataggatgcccagaatttgatcctgagacaggaagcctgtgtttttgaagtcacactttagtttagaattttaatttctcatgatcagaaaagataatgacaggtgtttcatttattcttcgcagaaatcttgtcaaatacttgaccaaaatagttttataaaaactgcagcatgaatatttcggtgttctgtgcaaaattagatgtgagtgtgcgtgtgtttgtatgttttctatgcatgtatctaaaaagtaaactttttttttttttactttttctagggctgttataaaatacagaattttaataatgtaatacccgaaggtatgaacttgagtttcctcattgccttaatttcaaataatggaaattacacatgtgttgttacatatccagaaaatggacgtacgtttcatctcaccaggactctgactgtaaaggtagtaggtaagcatgattagtgtccagtacacacaacaagcatgtgatcatcttgttatggtttttaatagtttattacacactagtatgtaaattgtataagaaaagtgattcatgttttttgtttacagtactgtctctagagccttcaacaattccatgcacatcgtaagcattcagtaactgttggtcaactgaatgaatatgtgaataaatgaatgaagtaaaggtagtttggggagggaaaggagcaccagacagatctgtgttcaaattctgtcactgccacttattagaaacatgacgttgaacaaggtccctgtctttatctgtactctggaactgcaattgattgagaatatttaaaaaaatattcatattgtattaatgcagtttcaggcaagcaatagagactcagtgcaacacttttgtcaaaagaatgttttacttggattaagtaaactctatttttctacatactgaaactgctgtacctattgctgaaggtatttgctggcaataatgttcaaccattattttgcactaagagaatagggggtgagaaactaggaaagtgggaaaggcaattcttagacagagttgacaaactcctagcaaacccagaaatagagaagtagtgtcaggatatatggcttttggggattacccctaaataccactgtgtccagtgtattaaaaaagatagcatctctgggtattgttttgtcataccccatcttttaatagatggaaacattaggctcactgacaagaagtaacctgtttagagacactcagtgagttacttgaagaagtaattctagatcccaggtctctgctcagggctttttctactggtctgacatgatttagtataagttagctacaaacagcctttcatatagtgcaaatagtattcaaacaatgtcgtaatcacttctgttctttttctgcttactttctaaataatgctgagttggggattaattcataagaaaaaaacagactaaattttaaaagtcaaatgaataatgtaaccttatattcatcttagcagttgtttctaatatatgtgcttaaaagtatgcattttggggaagttgggaataagcatactttgtcactctgattaacagatttaaaaattcacagacagatctgggcactgggggcttctttctcaaatttcaagcaacacaagtttgttgttttaaagctgcaaagtgttgagtatttattatatgccagtagcatatccttaatatatattccttagtttatttctcatagtgaaactgcgatatgagttttaattatcctcattttagagttatgaaaaattagcttttcaaaaattaggaaaaaccaagtaactttgcttttgcatttttatatggttaatatatggccaaatcaggattagaacttggttattaaatctttggagctcatacttttgaagacaatactaaaaactctactcaatgtattatttttaaaaaattaggagtactgaatattataaagagcagcaatctcataaacaaacattcaactggtaactagtcatcaagtagactaatgtgccggccttaacatcatgattgtgaattttccattgatttactcattaatgtaatacttatttaaccagcttccatactagacactttcggtaatgttgtgaagaaatacagagagaagaaacaactgactaaggcatgaaagcaattaggtattatgcaacataagacatctatctcatgtaagctttggaaagctttgctaagcaatccgaccttaagcatggagggtatttagtatgttttatttttttctttgtaaagcaaaaactatttttttctatgctcaaaacacttttgtcactaaatgtgtggctcttctatacaaagtaattctcaccttttctgaggacattaactgcatgtcctaaagtttaattcaatttgacaccagttatccagagttagcactgaccccacaggtgaaggactccttcctaaaagactgccccaccccctactttagattccagtcacaagcaataggttcccgcgttacccacaactctgcctgagttggctacaaacttaagattcctactacttcttcctcaggttctgtgatttggtataactgctcacaaaactcaggaaaaccttttacttacccttactttgttattatagaaaatattataaaggattcaaatgaacatccagctgaagagatacatagggggagttctggaagggtcctgagttcagagctccaccctctcagcttgtggatgtccttaccaacctagaagctctccgaacctcattgtttagggtttttatggaggttccgtcacacaggcattattgagtaaaaggactggaaatttcagccacactcccaaacttccagggatgggtgagaggctggagattgtgttaatcatctatggtctttctggctactagcgctcatccagaagctatataggaaccctagccaccaatcatttcattagcatataaaatccactcgttactccagagattccaaaggtcttagaagctgttgtgttaggaatttgggactagaacaatattaaaacaatagatgctcctattacccctgtcacacaggaaatcacaggggatttaggagcccatgtcaggaactgggagcagtcatcaaacctgtatttcctttattttatgctttgcttgttttaaatgactgaagtgcagtaattgagtatatcttggactataggccttctctaaaacaactgacaaactatgccaggaagttaggcaagattcagagaagagcagaatttttaataaggctgcctgatttaacatcatctcccttttttatttcctctaacacaggctctccaaaaaatgcagtgccccctgtgatccattcacctaatgatcatgtggtctatgagaaagaaccaggtaattacagctatgtctctgaatttcacttagattctcttaattacaaggaataaaatgtcatttaagttaatgcaagaaaatagacgactgttgtagagaaacacatgaattgaaactgaaatgtcagaaaccaaagcagctgtggagatcagttacttccctgatcccatgggcaactctagaattttttgcttcactctcggtatctgctcccttctccctctgctagccgtcttcctctgctgatgagtgatttctgtttgatgcaaactttagcttgcacagggctttggtttgccaaggctgcaacatgggcacaagatttagacatccttcaagctcctgctccattatgaaaggtcagtggtggatcttgaaggcaagactgtgaatataatagctaacaactgataaaactagtagacattgacgcagaacactattgaatgcttactgtggctcttcggttcttcttttagtttccataatttttcattatagccaaaaatcattgataactgaccaaatacgggataacatgttactcttttgactcaaagcctcccacagttaagtgaacaggaaactatagaaaattttaacattttctatgttgtatcacttacaatacatccagtccaaacccagtgagaggtgttaacctaaataacaacaaagacaatagctctccaaaaagaaaaggatttattcaggaatgaattgcagatagcaatccaggaatatgagtgctatggcatcccatgcgggaaccatagccatacccagaaagcataggaacataacagttttgaaaggcaaagtgaggaagattacataaagttgttctgaaataattatccttggttataagaaccaataacagggtaacatccgtccaggcttgactggcatttggtggtcagacctcctcacagaaatattatttgtttaagaatcgcgctggcctttgtgcaagatagtggtgctcagagtctttgtactagtttttataataggcatgtgtgtgtgagggccctttttatatgacctcccaactgtttttctttggagtgtgacacgagtgactccattttgactctgacagctttcacagaggtataaaagagcatctgtttaaaatgtgctaaagataatagtcagttgttaatgggtgaaagcaacggagaggatgccattcaataaaaaaaaaaggtggaaaaagaggtatgtagttgttcatggaaagctgacaaacacaggaactgtcaaaatgcatcctccacttgacacacctcttgtttcaggcagtgcctgttttgtggtcagtggggagtatgtaggatatgtatcagagaatgaaaaaaattaaaaagtttatggagtgggtgcaagacacatacagccctgatgcgtatctctgggccctatctaaagggtccctgaagtcttcagctcactttccttaagccataagtacaacttgtcggacatgcacgcagttgccaggcgggtcaagtggcagtaacttgagggtgatgtttccgagggtgctccctacccacactgcagcggggtcctcgtgtgctcgcggtgcatttttgcagctggcgacttgaactgggttgtgcacaagcaccattggtttgccaataagtttaacctggatgtggaacatagatgtggacctcttcgccatccagtgtttgggtgagcaccggaggcataaagctttatagaccttaaaacactgaccattataggcaatcttagggtgcattttgtgcatccttcttattatttctatttagttcctcttgccaataagcatcagaaaaattgtatggagtcctctttggggtagggatgctaagtcttcatgcagaaaagctgcatggtttctgcagagcacaattggctagaaaggctgtaacattaaatgtttatctagaattaacatgagtaggagtaaaagtggctgtggcatcagggcgggcagcaaagcattctggagcgagggggctagggtgactggggaagaggctgatgaaaaaaataaatcaattaaaagagttcagggacttaacaaaatgagatttgacctgtgccaaaactattttgagaattttaaatatgacatttttcctggtatgaataaatttatagcaacaaacaataataaagatacaattgatcttgtatgttatgtatgttgacagagaaatttgattttgctctaaaaaagataatagtgatcaacatagatggagaacaatgccaaaaaaaatcaagataagtttgaaaatatgacttgctttgtgaaacacagagaacatggtaagaggctgaatttcctagaattaggtatggctttatatagtcatatgaatactcttcctgctgtcagggtaaacccttattaataacataaatatatttgtctacctgtcaaactatgctgacagaaggattgttgaatccgtgttccctttatctttcttagtgacatacagatagggaaaactggagggaaaagacttaaggacgttgcaatgggagggtagatagagtatggccacgcagtcaggtaagcctaagttcaaattagggtgacgatataatttatcatctaaaccaggacactttctgtgagtaaacatagccactacctattaatataggtaaccaggaaagcaggcataaaacagaactgttctgggcaaactgggatggaaggtcagtctaggtcaaatcctggcccttcacttattactgatttaacttaggaatatcatttagcatccttaagcttcaccttttacatttgggaaacatagattttaaaaaataccttatggtgcttttgtaagattaaataagaccattaataaatataaatatttagcataataacttgtacaaagttcttagtaagtatgttgctactgctgctgttactactgttttctgcctagggatctccctaacctcatgttccatctcagagggatagcatagagttttctatttttaagttatcttaaaatttattgaatgcaccctgataggtggagcatttcaaggtgggcctcctcagccagatctctctgtgatggtatttccccatctttcctggccaaggactgaagatatggagaacctgtcctcagtcacccttcttgaggaaaataacaaaggagaagagcagtctctggaggtctagggctaaaaagaatattgtcagagacctttttttttttttttttttttttggagatggagtctcactctgttgcccaggctggagtgcagtggcacagtcttggctcactgcaacctccacctcctgagttcaagcaattctcctacctcagccccccaagtagctgggattacaggcggtgccaccatgcccggctaatttttgtatttttagtagagacggggtttcaccatgttggccaggctggtcttgaactcctcacctcaagtgatccacctgcctcggcctcccaaagtgctgggattacaggtgtgagccactatgcctagccttgtcagagactttttaaacaaatatcatcattttagaatttatttagattacattaaaaatggtcactctggtaattttatacaaagttgatggccttctttatttggtttcgcttgtttgttttggaatgaagtatggtgcattaccttatgggagtcgactagagaattactcataagcagggtttcaggtacacataactcgtagcttctgattagccagagagtagaaccaatatagccatgtgaaggataaacactaatgggctaactttgtctttgttttttgttttgttttgttttgttttgttttgttttttgttttttttgtttttttggttttttttttcaggagaggagctactcattccctgtacggtctattttagttttctgatggattctcgcaatgaggtttggtggaccattgatggaaaaaaacctgatgacatcactattgatgtcaccattaacgaaaggtatcatgggggccagcaagggagtgattaacctttgtttctcaacttaatgatctctgatgtgtgttctagtcaatgaaaataaaaattctcatttttccctatcactaacaaaaatcggcaagattttcaaatctttggtgattgcatcccaaaccagggttactgggctagcaatgcaaggaatagatgctgcctgatgaccagtggagagctgaattagaatgttctgaggctgagcatcttcatcagattgtccagaggacatgcaccctattgtcttaagcccagcaagattcacacatttatgatacccacatggaagtagagagaatacatatcttacatgaataaaaaggtcacaatcaagggttgtgggtacgtggaaacctacagtgtagttgtgttttttccttttctcaatcctagtgtctggccctatgtatttgtgccttaggtaattgtgttttgtttttttttgcattgcagtgagcatgcattttctctctcctcctctttcttatctcatataacctatagttacatttataattagtaatttttaatattaactaaatacgtttgtgtaatttaaattttattttaaaggtagatgggtagtaatataactcacttttaaaataaaataacattttattcctaaataaacctgattttttaaagcgttggcaaagtggaaagtgtgcgtccttgaagacagaaggttccactgcaaatgaagcataccattaccgaacagcagttggctcactgcaccaattaaaaatttgcagctggtcagctatatgacaaagtaatgtagctggaggctcacagggagaattattgatcttttttaggaatttttaacactttgtagcccatccttataataataatgaataaataacaaggaaagtcatgttgttccaccttgctgctgttgaaacgtactcagtgttcataggatagcagtggcgttaagcttaagcaaaaccaatcagagcccttaaccaaattctcatacctgacagtaagcctagttaaaaagagaacctagatggcagtcagctgtagcagagagatttttctctgcgataagtaaaggagttcaaagggattttaaattctgatcttggacccaaaacacttgatctctgattcactgagagttggatatatttatttttacaaagtttacgtgttcataacagctttctctttttatatgttaggatttaaccatgagatttcagatttctgaccacagtattctagctgtgttcagaatccatgctttgggaatcactgaaatgcatcagctattcctatgggataacagtaatacctacatgaatatttattaagcattattctaatattcatgccttagcatattcagtcctcagaattcctgaataaattaatgcatgtaatgcactgtgtgggcattatgacttccctcttttccaaaagaggaacctgagacctggaaagattagttatctcacccaaagtatatagccaggaattgacaaatcctggataaaaacccaaaaggacctggccccagaagcttctctctaaactgatacagcatcctggctcagaagtttaagcaaaagagacattttgttttgaagagagatctataaaaagaagccagtattgggatttggtctagacaatgggatagtgtgtagcgtagatggtatagtatagtgttagaatcttaccattaatactttgtaatcactgcattataggtggctcagcttatcaaccttcctcgccctcacctgtagtgggggtctgtggttgcttacttgtctgattcctacacagtccatagctcttgagtcactctcaaatgctttgattttcttctctctatttctagtataagtcatagtagaacagaagatgaaacaagaactcagattttgagcatcaagaaagttacctctgaggatctcaagcgcagctatgtctgtcatgctagaagtgccaaaggcgaagttgccaaagcagccaaggtgaagcagaaaggtaatagatgcggtcagtgatgaatctctcagctccaaattaacattgtggtgaataaggacaaaaggagagattgagaacaagagagctccagcacctagcccgacggcatctaacccatagtaatgaatcaaacttaaatgaaaaatatgaaagttttcatctatgtaagatactcaaaatattgtttctgatattgttagtaccgtaatgcccaaatgtagctaaaaaaatcgacgtgagtacagtgagacacaattttgtgtctgtacaattatgaaaaattaaaaacaaagaaaatattcaaagctaccaaagatagaaaaaactggtagagccacatattgttggtgaattattaagacccttttaaaaatcattcatggtagacttcaagagtcataaaaaagattgcatcatctgacctaagactttcggaatttttcctgaacaaataacagaaagggaattatataccttttaatattattagaagcattatctgtagttgtaaaacattattaatagcagccatccaattgtatgcaactaattaaggtattgaatgtttattttccaaaaatgcataattataatattattttaaacactatgtatcaatatttaagcaggtttataatataccagcagccacaattgctaaaatgaaaatcatttaaattatgattttaaatggtataaacatgatttctatgttgatagtactatattattctacaataaatggaaattataaagccttcttgtcagaagtgctgctcctaaatcagactgtgtctaaaactttctttgtgtctctcacctaacacagaatcccagaaaatcccttcaaggatgttttcaatggtcttgagaaaagtaatgatgagttatcacacatgaaatcatgaaatcaggtcattcagaatcctcctggctcctagtctatagagtgtgtaatatttcttcaaaagtgaataacatagcacataattgttacattttacagagacttaatgcttttttaaagctgatgaaaaacaggattcacctcaaactttcattacaactttaaaactaaatagcaaaggcctgaaatgtatatgctgcgtatgaagtactagtgaatcagttcagggtaattcattgcttctgctcctcagaagccagtgtgaaaaggaaagactgaagtacatgatgtaaggcagtttcccaaattgagttctcgggaacactactaagaatcagtattgtcctgcaatgcattattgtactctagaatcagagcacctgtgttgaaattctggtttctgcacatcctaactctgtgaaaagtaaatctctctgagccttaatttccttatatttaaagtagacacaataataccactaccttataaggttgttttaaagtgctcagcacagttattggcatatatacctatatatgaaatgctcaataaatatgaactcattatttccttaagattttcataggtgttatttgacaaaggcttttatcatcaaataagtatcatttatgtctggattttaaaaaatcaatcaagttactttagttaggacccattcaagtatttaatatgtgaacatttgatgggaatatctgcgggaagttggattatagtggcaggatgttttcatatgtatttgactccagatttcttaagtatggagctttttgtggggatcatcttctgagggatgtatcctggggaataattatggaaggtgacataaattaataacttattgtcaaatgaataggatcagaacaatcaaagcaaggtgtaatgtaggagtgaagcacaagtttgcctcccagagcgaccagagtagctccccttttacagaagcccctgctctaaatggtgtaataaggacagtgtcaggaatgtgaagtgacaggtggatcctctagactagatgatctgtgctgaaagctgatataaaatcactgtttggtcacacctgtgtatttccggtggtaccagaggagttgtggttttcttcacttggcttctattctgggccagctaatgctgaaattcagaggttatatctgagttcacattcatacattacatgtatgggactactctaaatttattagcaaagcattatatgaacttcctcaaaaggacatcaagaaaagactaaggcctggaatgagagaaagacactggtgtaggtcttattgacagcaaaatttcattatagtcagttaaagctaagtattaaagaggaggcagttgttttatttatattttatgtatttatttttatttattttttatttttgagacacagttttactcttgtcacctaggctgaagtgcagtggcatgatctcggctcactgcaaccactgcctcctgggttcaagtgattctcctgcctcagcctcccaagtagctgggactacacaggcatgtgccaccacgcctggctaatttttgtatttttgctagagacaggatttcaccatgttggccaggctggtctcaaactcctgacctcaggtgatcctcctgcctcagcctcccaaagtgctgggattacaggtgtgagccaccacgcccagctcattgttttataataacagcatgaaaaggactaaggcaaggtatctgtttaactttgtgagaaactgccaaacctgtttccaaagagattgtaccattttacctgtcctctagcaatgttcacaaattccaggcgctctatttcctcaccaatttttggagctgtcaaactttcaaattttagccatactgatggatgcatagttttattacattgtgctttaaatttgcatttattggatactaatgatgttggacaatttttcatagccttatttgtcattagctaatatatctttttgtgaagtatctgttaaaatgtttagctcatttttgttactggtcatttgtttttaaatttaatgtatgttaggatatagacacagacgcatatatatctcaaataaaagtcctgtgtcagatatatgaattgttaatattatcacccagtttgtgaattcattttcttttaaacagaatctttaaaactttgatggcatttattgtatcaatttattctatgcttagtggtttctaaattcagtattagcaatctttgcctaaagttagaaaggtattcaggttagaaaggtatccttctgtgttttcttctggaagactggtagatttttcttttagagttaggcctatgatccatttttttaatactctgaggtactgggttaatgtttagtgttttgtttttccacatagataaccagttgttctcatatcatattgaaaaatctttcctttgtttgttgaattgttcagaaaagagcccaaaaaattaattctatgaatatagatctatttctgcattccctgctctgttcatctgtttatctatctttagtccaatgccactttatcctggttaacatagttttaaaatttaaagtaagtcatgaaatcacatactatatgtcttcccccttttttctttttgaagattgattcaactattttaggaaccatatattttttttcgtatagatcatagtatcagtttgtccatttctacataaaggcctgatgatattttgattgtatttaatttataaatcagtctggagaaaattgaaatcttaacaatactgtattttccagtccatggatataatatatctctccatttatttagatcttaacttttttcagcattttttcttttagatttgagtgtacaggccttgcatatatattgttaaatgtatgcctaaatattttgtttttgatgctattgtaatagtacttttatttaaatttatttttgagacagagtctcactgtcacttaggctgcagtgcagtggcgtgatctcggctcactgcaatctccacctcctgagttcaagcaattctcctgcctcagcctccagagtagctgcgattacaggtccccactaccatacccggctaatttttatagttttagtagagacggggtttctccatgttggccaggcttgtctcaaactcctgacctcagatgatccaccctcctcagcctccctcccaaagtgctgggattatagtcgtgagccaccatgcccggcctgtaatagtactttttaaattttcattttccagttgttcattgaaaatgcaattaattgatttgtatatattgatcttgaccttttgaactttagggtggggtttgtttgtttagtttgttaggattttccatatgcttgattgtgtcacccatcatcaaacagatttttacttcttcctttctaaatttcataactttaataactttttactgtccgtttcactcttttggacctccagtacaatgttctgtagaagttttgagagcagccatctttgcattgtttccaaatttagagggcaagccttcaggtttttatatacaggatttttttgtagatgacctttattttcatgagcaattttttcattttcagtttgccgagaatttttttgtgtgagtatgttgagttttgttgaatacttaactggatctattgagagaattatatgtttttatttttaatctgtcagtgtgatgatttatacttactgattttgaaatgttcatccaattttgcatgtccagaataaaccctcatattgtcatgatttattgtcctttttatatattactggatttgatttactaatattttgtcacagatttttgttcatgttaagaatttttttttttttttttttgagacagagtttccctcttgttgcccaggctggagtacagtggcgcgatctcggctcagtgcaacctccacctcctgggttcaaatgattctcctgcctcagcctcctgagtagctgggattagaggcacccgccaccataccagcgaattttttttttcttttcagtagagattgggtttcaccaaattttgttcatatctttgttcatgaaggatattggtttgtttggtttgtagtattcttttcttgtaatgctgtgactaatgtgagggttatgctggtctcattacatgagctgggtaatgttccctcttttgtgattatgtgaaagcctatgggtaaaactggtattatttcttgctcaaaagaattactcatataactatctgggcctgttgtgtttttttttttgttgttgttttttttgagaaggagtctcgctctttcgcccaggctggagtgcagtggcgcgatctcggctcactgcaagctcggcctcccgggttcacgccattctcctgcctcagcctcccgagtagctgggactacaggcgtccgcctccacggccggctaattttttgtattttcagtagagacggggtttcactgtgttaaccaggatggtctcgatctcctgaccttgtgatccgcccgcctaggcctcccaaagtgctgggattacaggcgtgagccaccgtgcccggccgttgttttctttttgggaaagcttttaattatgaattcagtgtcctttttagttattgagattttctgtttcttcttgtggcagttttggctttcaaggcatttttttccatttcatctaagttgtcacattattggcatacttttctttagattatttcctattatccttttaatgtctgcaggatttttagtgatgttccactgtcactcctgatattagtaattggtgttttgcctttttttgtccttcatcagtcaagataagggtttctcaattttgctaattttttcaatgaacatatttttattgatttttctctgttgtttatatatttatttactttattcatatacttattttcctctttttgcatactttgcacttcattttctttttgtcagtcatcctaaaatgtaagctgtatcactgatttttaagtaattcttcttttccaatataagtattctgagctatgtgttttcctcataggattagtttaactaaatccaacaaatgttgaaatgtcgagtttttgttattattaagttcaaaatactttctaatttctgttttcatttctttttgacctaagggttatttcagtgtgtgttttttaatttaaacatgcttggaattttccagatcgttttactacattatatatgaaaattcatttgaattttagagttggctttatgttcactcttgatagttatttgtaacatttcatattgtcatttaagtttagctaatgtaaaaaattagaaaaaaagtctgggagcaggtatctccaacttagaactacctgagagaactacattacggagtggagaaacataggtttttgttctagatagacctgggttcaagttccggactcagtgctggctgtgtatatgaactagtacaagccttccttttcttatccttcaggttcaatttccagggtatctgtgaaaaccgagggaatggggaatgagagctttgccacagtgctgcacacttgattctaatttctaatcttttatttaattctgatgtgtccaaagaacatactttgcatgattttattctttttaagcttattggtacttaaaaaaaaagtatttgcagactgcctatcttggtaaatgtttgatatgcatttgaaaaagacatatattttgtagtttcgagtggtgtccagtaaatgtcaactaagaaaattggtgtcagtgttgttcatgtcttcaatatccttctgatttttccaatatactttgttattcagttattaaaagagagaatggtgttgaaatctttacatataatatggatttttccaattctctcttcagttctgccagtatttgtctcatgtattttggaactgtgatatttaatacatgcttatttaggattgacaagtctttttcatgaattgactcttaaattgtgaaatgtccgttttttctctgttaatactctgtgtctaatatgaatgtagccattccagctttctttttttttacttttttaattaattaatttttttttggtagagggacggagtcttgctctgtcgcccaggctggagtgcagtggtgcgatctcagctcactgccagctttcttataattagtatatgttttttccattattttattttacctatcagcatctttatgcttttatacttatactttatacttaatgtatgtatcttatttacagcatattattgggtattggatccaatctgatcatttctggcttttaacttgaatgtttaatccatttttctttaattattaatatgactgcctttaagtttaccatcttgctatttgttgtccacctgtctttatttttatctcctctagactaattggtattttcattgtattttattttatcacttttttgagcttttggctcttcctttttgtttggggcttgttttgttttgtttcctctagagtttataatatttttcctaaacttatcagttgatcttgaattaatcactttacatattttatgagaaacttactatggcgtatttccatttcttccctcccatcctttgtgttgtgctataatacattttggttttgcatgaattacagtgtaccaacatgtattgtgaaagtttggctttaaataactgtcttctattaagttaagaactgatctttttttaaatttatttgcttattttttatttctgacactatccattcttggtaacattttaatctgaagaactatttaatgtttctggtacatctgctggtgacaaattctctcagctttgttttaatctgaaaatgtcctatttcattttaatttttatatttcaaaactttactaagaaagttttcaaatatatggaagattttaaggaattacacagtgagcagtaatacagcctacctagatcctaccattaacattggttatctttgctttatcacatgtctattcattcttctgccagtatatcaatccatcttattttctgatacatttcaaagtagatgcagacatcagtaaacatttaagctccttatcattatcagtgttttaatatttatttgtaggtttcttttctaggtaaaatttgcataaagtaacaaattgcataattcaagtgtaccatttgataatttttgagaaatgcatatatatatgcattacctaatatcctattaagatatagaatattaccatcaccagaaagtaacattcttccccttatcagtcaatcctttctacccccaccttccccacctccccaaacaatacaactgtttttatttccttttttagaatagttttttttttatatattctagaactctgtgtatgtggacccatacagaatgcgctactgtataactgtaccttcactcagcaaatgttcttgatattcacccatgctgttgtgtgtatcaggcattttctccttttgtttgccatggagtggttttgttttgtttttgttttgtttaagaatgcagaatgatttgtttattcattctctgggtggtgaacatttgggttgttatcagttttggggtcttttgaataaagcttctgtgaactttcttatccaagtttcttaatggactaccgcttttacttctctgagatgaatacctatgagtggaattactgacttagttttatcagaaactgttagacctttttttttccccaagtggctgtatcattccatattccaccatcaacatatttacatcttaaggatttggtgttgtcagccttctttgttttagcaattataggtgagtgtatggtggtatcttactgtagtttaattcttcatttccctgatgtctcaaaatactgagcacttacacctcatgtgcttattggccatctgtatgtattttttgatgtgactgttcaaacattttgttcattttataaatagtttgtattttattattgaatcttagctgttcttcatctgtcctggataccagtcctttgtcagacacatgttttgcaaatacttttccccagtctgttgcatgacaatttgttttttcgtgaagtgttttaatgagcagaggttctcattttttatgagatgtaatttattaacttcttctttaatgattattaatttctgtgttctaagaaagctttgcttacccatagtcaggaaggttcacctttgtttaggcctatagtccatctcttttcttttttttcatgaatggtgtgtagtagaaattgaagttcagttttcctttcataccgatatccagttgttccagcacaattaattggaaagatttttactttctcattatgtttctctggtgcctttgtcaatattttcacaggatatgttgaaagtgtatctatttcttttctttcagccctttaaggtattccattgtctcctggctaatattatttaaaatgcaaacggggcagtttttgttgctgctgttgttcttgtttatttttgtgccctttatgtatttgttatgtttttctttggcagattttaagatcaccttttctttattgattttgaaaatcaaattatgatggcctgtggtgtcctttgtgtgtgtgtgtttcttacttagagtttattaaacttctcagttctatgtgtttatatttttcctttactgtgaacaattttcagccattttcttttcaaatatgtctagctttccccctcactctttctcttcttttagtactccagctgaaattaggatagaccactgctatccaattagtagtgccccacagatcactgatctcgttatttttatttcttcctttttcatccttttccctgctctgtgtttgtgtagtttccaatgtatgctggccattttctttgtgatgtctaatcgatagcattttctttatttcagaattgtatcttttagcttttgaatttccatatcttcattgaaaggtccctattgatattttctatttgctgttcacaatgttcatggttttaaaaaaattgaacaaatacacatagaatactcatttttaggtgtttatctgataattccaccacttttgtcaatttttgttctgttttgattagctatctttttattagctaatatagacttttttgcttttttatatagctttttaaaaattatatgctggatattatggatgttacaattttgagttctgaatttcgtaagacagtgttaaattttgttctagagggtaattaaattacttgcataactgcttgcttttaaaaaagcatcttatctttgttaaagcaggtctaaaatagccttttctgtaaggttagattggacctacttctaaagcatgtcatacctgaagtctctaattaatactggggagctaaacacagtctcttcactctgagtggcctgtacccaactgtctcacagcccttcatgtgctcctagagttgatctgttcccagctattctttgcctaaccttttaaagtattcccccaaatatgtgtagctttgtatttggccgaagactcgagataatcctgtgcagatttctagagttccatctctaaatagttctcttctctataaatgcaatctgactcaacagcagccttgaactctcatttctatctctttagctcagtgtgaccactttctcattttggctttcccttctctgtgccacagtttaaaaggtgcctttaatcgaaaagccagagtgatcgtagcatttacctcttttttgtcttttctctcacagatcacattcctgtgttaccagttgtccaactttttacaaactgtattttagatatggaaggaaggctagtccaggactagttactcctttaagaacagaagctgaagtccaaagtgcacatgttttaacacactataatagccaaatcagtaacatctgcgagttaatttagtcataggtctctgatttatcataattttaataaagcattccctttgtttacaactcaggagaatggtcattaccacagttccaaaaattatccatcagtcccaataatttagaacggagtagccatgggttctgtggcagggaacacttggaggtgcaagcagctggcatttagttgggacatgcagtggatggcaaggctccaactgcaataataaagatgacggaaatcactcagatttcctagagaaacgtgattgtagagcaagaactcaaaacagggaaaatgccaagagctaaccaaggtggttacctggaaatttgggctttgaagccagttatttacattgaactacaaaagggatggaaaaaatactgatttaaggactaacaaccatcaaggagctaaatctggctacatcctgaatcagaatattagtaaaatcaatgagagaagtttaggagtccagtttggtcgtactacatcatgtctttctgataggaaattctttttttatttttatttttatttttttgagacagagttttgctcttgttgccaaggctggagtgcaatggtgcaatcttggctcactgcaacctccgcctcccaggttcaagcgattctcctgcctcagcctcccgagtagctgggattacaggcatgcgccaccacacccggctaattttgtatttttagttgagacagggtttctccatgttggtcaggctggtctcaaactcccgacctcaggtgatccaccggtcttggcctcccaaagtgttggggttacaggcgtgagccactgcgcccggcctctgataggaaattctttagtctggcattgcatcagagtgaaatctttttgtcaaaacacctgagggtccagctaggcagtcagcaaatgtagtctgagggtcactctttccctgtaagccagcactgctttacctgaaagccctgtagagaacctcttgcatgtgacttaagctatttagaaaatccagctagtagattatttaagagttcgatacgttaagtagcattaatgactcctttttatcaagattgctctacaaaatacagtctgtaaatatgacaaatgactgtatgacacaaaacagaattaaaatgccccattagaaataaaatgggcagtagtaaaatgaatgaggcaggggaaatttatgagggtaattgatctctcggtcattaagcaggctctctattggcatttaacaaaaatccatttcaggtacgtgcagccagcaacaacctccacccccattacaaaatgttcatccagagagagccaaaataactgagcaaataatgaaaataacagtggaaattaccctgttgtactgttaacataacgtactcagaaataccaaggacacagtgattttcatgccagctatccaaatagatcttagtaaactttcagcaactgcactaacacagcttctggaatttatgatggagttttcttgttttaaggtgccattattcatggaaggagtagaagagtacctggtaataattttgcactgctaagtcccaggctatacctgtggcaggattaatatccccagtttaggataataaaatcaaaactctatgattcaccctttaataagagaacttcaggttcagctccaggctgcttaccattttctgctttgaatagatgcctttttaaaaagtgatttcctggatgtgaagctgatctgcctgcaacatctgtcaccccattgatcaccagggtagattcagcttatctggctggctaagcgggtgtccccttcctccctcactgtttcacgtgactccttcccgaagctgcgcactcagtggaagaggacgaccatctgcaatagagggggactggtcttttgtcaagggtataggagtagctgtgctcccctgctagaacctccaaacaagctctcaaggttcataaacgtgattctatttcaactgttgtatgatcaataattgagcttcatcgtgatggtgttcaaagatccccgcactttggagtcagggagcctctacagcaattccagcttggaatgagattcttctaagctgtgtctcagcaaacatttaacatctacaatgttctaggtgcttacagaagccttccctcaccaccttatgcagtacaccgcccttgccccagtcccacccttcaatcacctctatcacattaccatggtttatttctcttatagcactaatcactatttaaaattaaccagctgatttatttctttacatatttactgccctgaattagaatattagccacaaaagggcagagaccctttccgtcttattcaccattgtatccccagaagcttctggcaaatggtagatgtcaatagataataatcaaattgactaatacacaatttaagccactcctgcttcagacccagtaaatatactgttcctccttcaaacacttaaacttcattatcacaagctaataaagcaactaaataaaattgtgaaacataatttagtaatagacttctaaatatcccagaagtgtaaaatcttatatgtggaaatgttcattgagatactaggcattctagggatatcatggaagaaaaagacataatctctacctgaaagactgtaaaggtatagttaatgagagggagtgaagaagctgacctgtagacaaattacaatataataagtaatgctgtaatcaaatgataaacaaagggaagagtaaaaatttctacacgggagagccaggtttcaataaaaattttattctataaaagcttatataaaataatgatattcgagcatagacttggaaactaaaaagagaaaggacttccagccagaagtcacagcatgagaaacgggcatcatattaaatcttcctgatgtttttgatgaaaaagcaatggtaaatgagaaaggaaggaaggtggttagtaatttggttgtgacagaccttgattatagggctaatgagttaagatctggtttttaagtactggagaattacctcactctatttctgatacttccaaagaaactgcaaaggtgcctaaaatataaaaaataagtagataatgcagaaatctgttcacaatcagatattgcaagttcacctctagaatatgtactgaagaactgtgaacatgggaaataacttccagaaccaagcatattcagcatctggtggatgtcctttgcttttgcacagtgaaaataatgtttttgaggccgatttccaagtagaaaggaaagacaattaaattcctttcatactacactagacaagagaatgaaactatagtggaaaaatattgagatttttactcaaatcagctgcatcaacaattaaaattctaccaataccgtggacttcttcaggtagcaatgagaactccatcccaagatatggaccgaggatggaatgataattttcaaaaatatttgtaaggaggtttaggtgtcaaattgtgacttgaatttgatgaccttctaagcccttcctgatgttatgattctgttttaatttatatattgtcaaagactattcaaataaaaaacaccttctatgccaggtgctggaaacaaaaagataaacataacacagtctagtattttaaaatagtgctaaactctacaatgttatctctgattgttcatacataggcaggtgcatagctaagctgcttggcttatccagctatttgccgggatggtgggtcactgtggtcaccacacagaaatcaattctgtttctttgttgttcattccagtgccagctccaagatacacagtggaactggcttgtggttttggagccacagtcctgctagtggtgattctcattgttgtttaccatgtttactggctagagatggtcctattttaccgggctcattttggaacagatgaaaccattttaggtaagtaacagaaatttgacataaacctcttctactgtcatctttagaacatatgttgtaaaaaaaagaaaaaagaaaacatgttgatttgaaaaacctagattaactggaagatttaagcagattaactttaatttcaaccgttgctattagaaatctttccgaagattattattctattttcttggattaattagtgagtcggtctaaattaacaccctccaaatagaaatataatgcgagccacttacctacttaaaatttcccagtgaccacattagtaaaagtaaaaagaaacaagtaaaaataacgaattgactaaatatatttataatactattttttagcatgcaattaatattaaaaagctaatgagatattttagtgttttctttggtactaaaaatgttcaaaatgtaaaatgtattctactttatccttatagcacatctcaattcaaaccagccacatttcgagtgagcaatagactcgtgactcgtggctgctgtattggacagtgctgatccacactccttgtactcagatagagatctgtgaaccagcagcaacatatcacgtgtagcttattagaagaagaatcttagacctagcccctactgactcagaatctacatttaaaccatattcccaagtgattcatgtgtacgttaacatctgaaaagcacagctctagtgcaaatttgcttagtgaaaagaatagagcatttaaacatacaaattcataggtccaccccataaagattttaattcagtaggcttatggaagaaacacggaatcgatagtttttaatgagatgtgatttttctaattaagcaacttcgtgaaagattggtccattaaatctaattatatttttaattttagttcttttcagatataaataattcaggcagtttcacaaggttttactcaatttgtaattttaagatattaatgagtgataggcttggacaggaagttgaaattttctctacagtgttaattgccagtacctatgatttaccttctggctttgttaatttacagttgaatgggacaaacctcactctttttccactgtaaagcaacctgtaagatgagagttgaggatatatcagataacattcaaaattacatcttcaaatagtcgttttgcgtggagacttgttgcaagtagaaaatcgcactggaatctgtcacataatgaaaatgtctaatatgcagaagttagatttaagaaaaatgtaatggtattgagaaactttcctaatttacattgtatctgtgttccttttgctagatggaaaagagtatgatatttatgtatcctatgcaaggaatgcggaagaagaagaatttgtattactgaccctccgtggagttttggagaatgaatttggatacaagctgtgcatctttgaccgagacagtctgcctgggggaagtaggtatttcagaggagtacaaatgatgctaccttgaaaggcagacagaatcattagttttgcattatgggagagagtcatggcacagcatctttggatatttaatgtccgatgctctttgatgtaacagactcctctagaaataaaactacgttggaaatgtatactattcaactcagtttatggtattaaaatattttcccttgcaatctttcagagatgcatgtcagaaaagcatggaggcacagtggattagagctctgttaaagggccatagctgtaaacatcctgtttattcacatttagatttttcggtttaggctaatctacactggttggtctagaactgttttacaagactgagaatttttttttaaagcagttttattttggttttagaaagacagaggtttacttggttttactaaaagtgagtggcggaagagtgtgggtagaatttttccttatgtgattcactgataataattacagtattttcctgtggcatttgctcttttttttccccctcacttttcttttcaagcaaaatagtgctactcaaattccccttttccttgggtctatttcttcttcctgtcagcttatacatttgagggttactttaaaattttataatagccagtgtaactagaaggtttaaaaagaaaggaaatgcctaaattcttgaatgtgttaaaataaaagtacaactcctttttagatccgcacagtaacacacaaagtaatttttcattggtgtctttttaataaatatataagttacattcccaaacccactgttaaactttatcctgttgaaatgcttgtaatatatctaatcataagcaagacaaaccaattttactcctctaaaatcctgtctacattcatcatttaacagtttttttttaaatattgcatggataattgagatagacttgaaattttattctcattttgatttagttggatcagttattttatcttcccaatcatcaaccaaaagtccatcataagatgtttctttcagtataatttttccaggaagttatgacttaattatacagttaaaggataaattccactcattttaatacttaatttccccagtcatttattcacccatttatttgttcgtacagccattcaataaatacttatctaccacggaactgggtaagaccctccaataggggttgataattctttgaagaattcacattctgcataattactcttgcatcttgcatttgttagttagcttttgcttccttttttattctccctgccgctcttacccaatcttctttgactctgggtctcttgccatgcttgcacatgctcagcctccagtgccactgcttggaacacacaatcattcctggattctcccccaggctgtgcatgctagattttaatcacaaggctttccctactgtttctgaacctgtgaagattaaggggcaaaatgacttcataaaggaatatatcaagacatgatataagtttccacaattctagtaagttacctagagttggcaaccatctgaaacacaggtaaaggactatgcaatcctcgataagcaactgtgaggagatggattggttccaagaatttagtgacagaaactaatcagggcccttgacagcagaataaaattacatggcatttccagttttcctgctttttcttcttttttcgttgaagaaagcatttgcctgttagtgcaagtagacacatcatctagcagctgccgaaacacatagctttatagtaatggtcggagtttgaggagaaagatccagcgattaatttaggctccaggggagaaagaagtagaaagcccaccgaggatgtgttaccagccaaaatgccattcagttggctagattttgttaagcttctagtctaaggacatagtgatgttagagtcagagaggtatccaacaatagagagggactttcagaagatgaaggtctctaactttgttgtcctgtcctagcaaaagataaaattctatttttttgattatataacatatacctttttgagtgtccattggtactagagagtttatgcatggtgcatgggtttctttggtgaagaaagggctcatgagctgacgtggctagaccataagatgccacacactttaaagaaactgctttcagtataatgtgtctactccttgtgtctcaagtgttgtttttgaagatcaaggtcacaacactatactaccttttggcttcatgcctgtttggaattctttttagaaatatgtgtatatagtttctgttttccctgaagacagtggtatttaacaaagagagtttgcaggtataaggattaagttgttcacatttttgctggtaaaatgtttcacctcaattcttaggctggtaccctaagttccctacatttgctcctcaagcctcaatgcttttggggagtttttggccaacactaatccccatggttgttttctttcccagttgtcacagatgagactttgagcttcattcagaaaagcagacgcctcctggttgttctaagccccaactacgtgctccagggaacccaagccctcctggagctcaaggctggcctagaaaatatggcctctcggggcaacatcaacgtcattttagtacagtacaaagctgtgaaggaaacgaaggtgaaagagctgaagagggctaagacggtgctcacggtcattaaatggaaaggggaaaaatccaagtatccacagggcaggttctggaagcagctgcaggtggccatgccagtgaagaaaagtcccaggcggtctagcagtgatgagcagggcctctcgtattcatctttgaaaaatgtatgaaaggaataatgaaaagggtaaaaagaacaaggggtgctccaggaagaaagagtccccccagtcttcattcgcagtttatggtttcataggcaaaaataatggtctaagcctcccaatagggataaatttagggtgactgtgtggctgactattctgcttcctcaggcaacactaaagtttagaaagatatcatcaacgttctgtcaccagtctctgatgccactatgttctttgcaggcaaagacttgttcaatgcgaatttccccttctacattgtctatccctgtttttatatgtctccattctttttaaaatcttaacatatggagcagcctttcctatgaatttaaatatgcctttaaaataagtcactgttgacagggtcatgagtttccgagtatagttttctttttatcttatttttactcgtccgttgaaaagataatcaaggcctacattttagctgaggataatgaacttttttcctcattcggctgtataatacataaccacagcaagactgacatccacttaggatgatacaaagcagtgtaactgaaaatgtttcttttaattgatttaaaggacttgtcttctataccacccttgtcctcatctcaggtaatttatgaaatctatgtaaacttgaaaaatatttcttaatttttgtttttgctccagtcaattcctgattatccacaggtcaacccacattttttcattccttctccctatctgcttatatcgcattgctcatttagagtttgcaggaggctccatactaggttcagtctgaaagaaatctcctaatggtgctatagagagggaggtaacagaaagactcttttagggcatttttctgactcatgaaaagagcacagaaaaggatgtttggcaatttgtcttttaagtcttaaccttgctaatgtgaatactgggaaagtgattttttctcactcgtttttgttgctccattgtaaagggcggaggtcagtcttagtggccttgagagttgcttttggcattaatattctaagagaattaactgtatttcctgtcacctattcactagtgcaggaaatatacttgctccaaataagtcagtatgagaagtcactgtcaatgaaagttgttttgtttgttttcagtaatattttgctgtttttaagacttggaaaactaagtgcagagtttacagagtggtaaatatctatgttacatgtagattatacatatatatacacacgtgtatatgagatatatatcttatatctccacaaacacaaattatatatatacatatccacacacatacattacatatatctgtgtatataaatccacatgcacatgaaatatatatatatatataatttgtgtgtgtgtatgtgtatgtatatgactttaaatagctatgggtacaatattaaaaaccactggaactcttgtccagtttttaaattatgtttttactggaatgtttttgtgtcagtgttttctgtacatattatttgttaattcacagctcacagagtgatagttgtcatagttcttgccttccctaagtttatataaataacttaagtattgctacagtttatctaggttgcagtggcatctgctgtgcacagagcttccatggtcactgctaagcagtagccagccatcgggcattaattgatttcctactatattcccagcagacacatttagaaactaagctatgttaacctcagtgctcaactatttgaactgttgagtgataaaggaaacaaatataactgtaaatgaatcttggtatcctgtgaaacagaataattcgtaatttaagaaagcccttatcccggtaacatgaatgttgatgaacaaatgtaaaattatatcctatatttaagtacccataataaatcatttccctctataagtgttattgattattttaaattgaaaaaagtttcacttggatgaaaaaagtagaaaagtaggtcattcttggatctacttttttttagccttattaatatttttccctattagaaaccacaattactccctctattaacccttcacttactagaccagaaaagaacttattccagataagctttgaatatcaattcttacataaactttaggcaaacagggaatagtctagtcaccaaaggaccattctcttgccaatgctgcattccttttgcacttttggattccatatttatcccaaatgctgttgggcacccctagaaataccttgatgttttttctatttatatgcctgcctttggtacttaattttacaaatgctgtaatataaagcatatcaagtttatgtgatacgtatcattgcaagagaatttgtttcaagatttttttttaatgttccagaagatggccaatagagaacattcaagggaaatggggaaacataatttagagaacaagaacaaaccatgtctcaaatttttttaaaaaaaattaatggttttaaatatatgctatagggacgttccatgcccaggttaacaaagaactgtgatatatagagtgtctaattacaaaatcatatacgatttatttaattctcttctgtattgtaacttagatgattcccaaggactctaataaaaaatcacttcattgtatttggaaacaaaaacatcattcattaattacttattttctttccataggttttaatattttgagagtgtcttttttatttcattcatgaacttttgtatttttcatttttcatttgatttgtaaatttacttatgttaaaaataaaccatttattttcagctttgaattttattttgtgcatgtgttttatgtcatttggtcatttggtcatttcacatttggtcataagtgaaaacagaaagaatttattatattcacaaagaaatataataagttacattagttaagtgtctttctgagataaatctgagtaaaatgggaacttcttatcaagaacattttctttacatggaagtaaaagttacttaagtaaaatgaattgttccagaatactaggacatattttatgggtgtatatgtgtttatgtgtgtatgtgtatgtgtatgtgtatgtgtatgtgtgtatgcagagagacagaaagactgtcaaaaagatggaaagatacagagagacagagaaaaaggagagaaagattattttaatacaaaggaaaacaagcttattcctttttactcaacttggaacttaggtcgtttacaggaatatttttcatctaataggctttaacgcaaccacacggtagttgctttggaaatagataaaactaatgccatgactttagttaattgatgatcatttgaatcaaagatgcatttctgttacaaattttgaataaatcagtgattaatatttggaaacatattttattttcggttaataatacaagtccatagtgacagggatgcctttttgctttaaaaaaaaaaatccctggccaggcgcggtggctcacgctgtaatcccagcactttgggaggctgaagcggatggatcaagaggtcaggagatcgagaccatcctggccaacatggtgaaaccctgtctctattaaaatacaaaaaattagctgggcatagtggtgcacgcctgtagtcccagctactcgggaggctaaggcaggggaatcgcttgaacccgggaggcggagattgcagtgagctgagattgcaccactggactccagcctggcgacagagcgagacttcagaaaaaaaaaaaaaatcctatttgttcattttactgagccctgtaacatgctcagaattggttagcttagtaaaggttcttctactgaagaattaattttccttttgcaaaccagccccaaaagtgtaggcttaggatcaacggatcgaagttacaaggcaacagatttctgctcagttagaaaatagctgtaaagcagagttcgacactaatggaattcactatctttggaaatactaggcctgccattaccagaggtatataagcatttatttgatagattttcattgagattttgtatatgagttttttgcactggataagtggttttgagtctgaagttgtttccaaccctgaacgtgttaagtgacctactagaacatactggtgactctttggaagattcaacttcagcattttgcatatgatctacctggctgtgattaaccttccttaaactctcaagatttttttttccagtatatactgatgtcactagctctttaacgcaagtaaatacacagtatggtatgagagacgggtttagcaactagtctatcttatttctctgtttctactcaaggaatataaagtaaccttagtaatgagttaggagatggagtgttttagtagtaattttaatctacatctatttaaaactgaatagacagaacttttacacactattactcttataaatccacatagtaagatgatattttaaagttagcattaataattgatacagattcaataaacattagtccatatatgattttactattgtgttcactagacgttgagcaacagtaatttaatcaaagtgatttatgcaatgtgtactgtgtgctagaaattcacatgtaggcatctaatttgtttatcagccctacgagtttactttatcatatgcattttatagatggatgaactaggactcaaaagatattaagatacaaatagggataaatggagaaagcaatatttgaaaccacattcgtcttccaagttaaatatttccttttttctatacttcaagttttaatagagaaaatgaaagagacagaggtttgctgttcttttatctactaataactcatccagaggagaaaaaaaaaaatgaccatcctagttttcttctaagtgaactccatggaagttatgacttttacaggcaagagtattcttgagtattgaagagttctcagtcatacaacatgacttcaaagccaatttagtaccacacaagaaaacaaatctcattattatatggccatacctcattttttgagccaaacagaataaatgagctaaattactactcctccaagtaaactttagcattaaaaataatagctcctgtcctcaaatatgaagttttggcaatatagaaggtattttaaaaatatgcaataaagcatgcaactccctttacagtattaagtgaagatccttcggtatagcccaggacctttctgagaagcatctcctacatgtgtttctcaacgtctaaaattccgccactcttacctgcatttagcattgtcctctttcaaatctaaacttcctcactttctggatggagtaccaataaaaaaattaaagagcaacagactcaaaagtcattttttaagaagatctggaacagtgtttgttgtattttaaacaacaatattcctattggcaaaaacatacattttcctaaggtgactgttttgaagtgaaacatcatatcacacacacacacacacacacacacacacacacacacacaatttgcatgagttctctttgttgacaagctagccatgttgccttaaggttatttcacatttctcaggagccaggagaagcagtagacttcccactttcatattctctgatttatgagaggcagcctcttaagattctgagtaggactagaggggactgaggagttgctaaaacacatgcacatgtgcacacactcgtacacacagaagggttttaatgataaacgagaatttaaatttatctcttaagaatgaatgaaacaaaatgtctctaaaaacatttttgcactcctgcttaaaccaatcaaaagttctcaaaacttgagcacgtgtctctccaatttcccttcaaattcatgttaaatccactgattgaaaaaaacaaaactataatctgtaagaagcacagctcccttattccctgtcaagttcacaatgaccaatgcaaactttcagtctgtcttccaaggctgaaaactctctccgttactgtttcgtccctggaccaaaagcagaggtgttcaccctcacacggtgactctggcacatgttttcaaagttataaatggctaggatttacaattttgaacctttttccttcaggatatggcatgttctaagctcctaaatctcacagtgagttaagcattacatttatttgaagaactttcccttgggatctgtccaaatccactttgataccattagaatcgaatggtttgccagaagtcttagctacttgactaattcttacccattttcattgtttttgcccctttaattccaattcttcacacacagacgcacacacacacgcaccacacacacagaaaaaagaatttaattgataacaagataaatactatgaactactatgaactgtccgatgttgtgtccaaaaatgttaagtatcaaaggatataactgagaatcttaggaggtgataattcctgttgctctttgctgatcagactatgtcaggagcattatgttcactcctgttcataatactactcttagaagacacatctataaactgaacattatccagaggaaaatggtaaacatgcagaggagacatgaggccatgtcatttatggaataagagaaatatcctgaaaatatttaatccagacataagaagaaaatactacaaagatataaaaatggttttcaaatattctaaacatttaaagactcaagatctgaccaccagataacatttgcgaggaagaagatttcaaaacaagaaataatttgtaaacagagctgaaatgacttgcttttgatggtggctaatattttgagggtagttactcaattgcccaccgtgtgtgtgtgtgtgtgtgtgtgtgtgtgtgtgtgtgtgtgtgtgtgttttaagaaagacttattgaagaaggagactactgcaatgagggttttgcagtaggagagagagactgagctcaactaccataccatccttgaaggcagtaaattcttagcaaccattgacaagagtggtgtagatttttttgactgggtaaattattcagcactgagattctgtcatctcaagtgtttgttcattccctgtcctctggaggatggacaataacgaactggaatatatgtaagttttcactatacattgtcctatatttccattttcctatagatacagtggaagcagtttttgatttcattcagagaagcagaaggatgattgttgttctgagccctgactatgtgacagaaaagagcatcagcatgctggagtttaaactgggtgtcatgtgccagaactccattgccaccaagctcattgtggttgagtaccgtccccttgagcacccgcacccaggcattcttcagctcaaagagtctgtgtcttttgtgagctggaagggagaaaagtccaaacattctggctctaaattctggaaagctttgcggttggctcttcccctgagaagtctgagtgccagttctggctggaatgagagctgctcttcccagtctgacatcagtctggatcacgttcaaaggaggagaagtcgtttgaaagagcccccagaacttcagagctcagagagggctgcaggtagccctccagccccaggcacaatgtccaagcaccgagggaagtcctccgccacctgccgctgttgtgtcacctactgtgaaggagagaatcaccttaggaacaagagccgggcagagattcataaccagccccagtgggagacacacctctgtaagcctgttccccaagagtcagaaactcaatggatacaaaatggcaccagattggaaccccctgctccccagatctcagcccttgctcttcatcatttcacggacttatccaataacaacgacttttatatcctataattactgtgtgtggtgggtggtggctactatctctaccaaccctctgtatgtcatgaacctgtgggaaaatctgacatttttatcatctaatggactatcagatttctgtcccctttattgatttttaaaaactatttatttctaggagacaaaagacctgaaggacctgaatccagaattattgcctctaaaggcctcagaagagcacactcttcttgggccctagaaggtcagtatgtgaaagttgcctaaagtctgatcctctatcttgtccaatggtttaaaactgagctaagaatttaaatgtgtttcttttcagtgagttgatcaacctcacattataagtcagtcaggtgtacttgggctatgatgcttacagggtgtatgcattcccagggagcagcatggaaaggagctggttctggtggaagctgtaggacgaagctcaacagaaaacctacagcacatttttcctcaaagaaccaaacatacccacccagggatacatggcgttctctgtctcactgtaaactagtgttctctaaactgcctaacattgttagcatcaataaaattctatttttacgtca

SEQ ID NO: 104 - DNA, 4745 bp, Homo sapiens
ggctcactggggaagactgccgggatccaggtctccggggtccgctttggccagaggcgcggaaggaagcagtgcccggcgacactgcacccatcccggctgcttttgctgcgccctctcagcttcccaagaaaggcatcgtcatgtgatcatcacctaagaactagaacatcagcaggccctagaagcctcactcttgcccctccctttaatatctcaaaggatgacacttctgtggtgtgtagtgagtctctacttttatggaatcctgcaaagtgatgcctcagaacgctgcgatgactggggactagacaccatgaggcaaatccaagtgtttgaagatgagccagctcgcatcaagtgcccactctttgaacacttcttgaaattcaactacagcacagcccattcagctggccttactctgatctggtattggactaggcaggaccgggaccttgaggagccaattaacttccgcctccccgagaaccgcattagtaaggagaaagatgtgctgtggttccggcccactctcctcaatgacactggcaactatacctgcatgttaaggaacactacatattgcagcaaagttgcatttcccttggaagttgttcaaaaagacagctgtttcaattcccccatgaaactcccagtgcataaactgtatatagaatatggcattcagaggatcacttgtccaaatgtagatggatattttccttccagtgtcaaaccgactatcacttggtatatgggctgttataaaatacagaattttaataatgtaatacccgaaggtatgaacttgagtttcctcattgccttaatttcaaataatggaaattacacatgtgttgttacatatccagaaaatggacgtacgtttcatctcaccaggactctgactgtaaaggtagtaggctctccaaaaaatgcagtgccccctgtgatccattcacctaatgatcatgtggtctatgagaaagaaccaggagaggagctactcattccctgtacggtctattttagttttctgatggattctcgcaatgaggtttggtggaccattgatggaaaaaaacctgatgacatcactattgatgtcaccattaacgaaagtataagtcatagtagaacagaagatgaaacaagaactcagattttgagcatcaagaaagttacctctgaggatctcaagcgcagctatgtctgtcatgctagaagtgccaaaggcgaagttgccaaagcagccaaggtgaagcagaaagtgccagctccaagatacacagtggaactggcttgtggttttggagccacagtcctgctagtggtgattctcattgttgtttaccatgtttactggctagagatggtcctattttaccgggctcattttggaacagatgaaaccattttagatggaaaagagtatgatatttatgtatcctatgcaaggaatgcggaagaagaagaatttgtattactgaccctccgtggagttttggagaatgaatttggatacaagctgtgcatctttgaccgagacagtctgcctgggggaattgtcacagatgagactttgagcttcattcagaaaagcagacgcctcctggttgttctaagccccaactacgtgctccagggaacccaagccctcctggagctcaaggctggcctagaaaatatggcctctcggggcaacatcaacgtcattttagtacagtacaaagctgtgaaggaaacgaaggtgaaagagctgaagagggctaagacggtgctcacggtcattaaatggaaaggggaaaaatccaagtatccacagggcaggttctggaagcagctgcaggtggccatgccagtgaagaaaagtcccaggcggtctagcagtgatgagcagggcctctcgtattcatctttgaaaaatgtatgaaaggaataatgaaaagggtaaaaagaacaaggggtgctccaggaagaaagagtccccccagtcttcattcgcagtttatggtttcataggcaaaaataatggtctaagcctcccaatagggataaatttagggtgactgtgtggctgactattctgcttcctcaggcaacactaaagtttagaaagatatcatcaacgttctgtcaccagtctctgatgccactatgttctttgcaggcaaagacttgttcaatgcgaatttccccttctacattgtctatccctgtttttatatgtctccattctttttaaaatcttaacatatggagcagcctttcctatgaatttaaatatgcctttaaaataagtcactgttgacagggtcatgagtttccgagtatagttttctttttatcttatttttactcgtccgttgaaaagataatcaaggcctacattttagctgaggataatgaacttttttcctcattcggctgtataatacataaccacagcaagactgacatccacttaggatgatacaaagcagtgtaactgaaaatgtttcttttaattgatttaaaggacttgtcttctataccacccttgtcctcatctcaggtaatttatgaaatctatgtaaacttgaaaaatatttcttaatttttgtttttgctccagtcaattcctgattatccacaggtcaacccacattttttcattccttctccctatctgcttatatcgcattgctcatttagagtttgcaggaggctccatactaggttcagtctgaaagaaatctcctaatggtgctatagagagggaggtaacagaaagactcttttagggcatttttctgactcatgaaaagagcacagaaaaggatgtttggcaatttgtcttttaagtcttaaccttgctaatgtgaatactgggaaagtgattttttctcactcgtttttgttgctccattgtaaagggcggaggtcagtcttagtggccttgagagttgcttttggcattaatattctaagagaattaactgtatttcctgtcacctattcactagtgcaggaaatatacttgctccaaataagtcagtatgagaagtcactgtcaatgaaagttgttttgtttgttttcagtaatattttgctgtttttaagacttggaaaactaagtgcagagtttacagagtggtaaatatctatgttacatgtagattatacatatatatacacacgtgtatatgagatatatatcttatatctccacaaacacaaattatatatatacatatccacacacatacattacatatatctgtgtatataaatccacatgcacatgaaatatatatatatatataatttgtgtgtgtgtatgtgtatgtatatgactttaaatagctatgggtacaatattaaaaaccactggaactcttgtccagtttttaaattatgtttttactggaatgtttttgtgtcagtgttttctgtacatattatttgttaattcacagctcacagagtgatagttgtcatagttcttgccttccctaagtttatataaataacttaagtattgctacagtttatctaggttgcagtggcatctgctgtgcacagagcttccatggtcactgctaagcagtagccagccatcgggcattaattgatttcctactatattcccagcagacacatttagaaactaagctatgttaacctcagtgctcaactatttgaactgttgagtgataaaggaaacaaatataactgtaaatgaatcttggtatcctgtgaaacagaataattcgtaatttaagaaagcccttatcccggtaacatgaatgttgatgaacaaatgtaaaattatatcctatatttaagtacccataataaatcatttccctctataagtgttattgattattttaaattgaaaaaagtttcacttggatgaaaaaagtagaaaagtaggtcattcttggatctacttttttttagccttattaatatttttccctattagaaaccacaattactccctctattaacccttcacttactagaccagaaaagaacttattccagataagctttgaatatcaattcttacataaactttaggcaaacagggaatagtctagtcaccaaaggaccattctcttgccaatgctgcattccttttgcacttttggattccatatttatcccaaatgctgttgggcacccctagaaataccttgatgttttttctatttatatgcctgcctttggtacttaattttacaaatgctgtaatataaagcatatcaagtttatgtgatacgtatcattgcaagagaatttgtttcaagatttttttttaatgttccagaagatggccaatagagaacattcaagggaaatggggaaacataatttagagaacaagaacaaaccatgtctcaaatttttttaaaaaaaattaatggttttaaatatatgctatagggacgttccatgcccaggttaacaaagaactgtgatatatagagtgtctaattacaaaatcatatacgatttatttaattctcttctgtattgtaacttagatgattcccaaggactctaataaaaaatcacttcattgtatttggaaacaaaaacatcattcattaattacttattttctttccataggttttaatattttgagagtgtcttttttatttcattcatgaacttttgtatttttcatttttcatttgatttgtaaatttacttatgttaaaaataaaccatttattttcagctttgaa

SEQ ID NO: 105 - DNA, 1974 bp, Homo sapiens
ggctcactggggaagactgccgggatccaggtctccggggtccgctttggccagaggcgcggaaggaagcagtgcccggcgacactgcacccatcccggctgcttttgctgcgccctctcagcttcccaagaaaggatgacacttctgtggtgtgtagtgagtctctacttttatggaatcctgcaaagtgatgcctcagaacgctgcgatgactggggactagacaccatgaggcaaatccaagtgtttgaagatgagccagctcgcatcaagtgcccactctttgaacacttcttgaaattcaactacagcacagcccattcagctggccttactctgatctggtattggactaggcaggaccgggaccttgaggagccaattaacttccgcctccccgagaaccgcattagtaaggagaaagatgtgctgtggttccggcccactctcctcaatgacactggcaactatacctgcatgttaaggaacactacatattgcagcaaagttgcatttcccttggaagttgttcaaaaagacagctgtttcaattcccccatgaaactcccagtgcataaactgtatatagaatatggcattcagaggatcacttgtccaaatgtagatggatattttccttccagtgtcaaaccgactatcacttggtatatgggctgttataaaatacagaattttaataatgtaatacccgaaggtatgaacttgagtttcctcattgccttaatttcaaataatggaaattacacatgtgttgttacatatccagaaaatggacgtacgtttcatctcaccaggactctgactgtaaaggtagtaggctctccaaaaaatgcagtgccccctgtgatccattcacctaatgatcatgtggtctatgagaaagaaccaggagaggagctactcattccctgtacggtctattttagttttctgatggattctcgcaatgaggtttggtggaccattgatggaaaaaaacctgatgacatcactattgatgtcaccattaacgaaagtataagtcatagtagaacagaagatgaaacaagaactcagattttgagcatcaagaaagttacctctgaggatctcaagcgcagctatgtctgtcatgctagaagtgccaaaggcgaagttgccaaagcagccaaggtgaagcagaaaggtaatagatgcggtcagtgatgaatctctcagctccaaattaacattgtggtgaataaggacaaaaggagagattgagaacaagagagctccagcacctagcccgacggcatctaacccatagtaatgaatcaaacttaaatgaaaaatatgaaagttttcatctatgtaagatactcaaaatattgtttctgatattgttagtaccgtaatgcccaaatgtagctaaaaaaatcgacgtgagtacagtgagacacaattttgtgtctgtacaattatgaaaaattaaaaacaaagaaaatattcaaagctaccaaagatagaaaaaactggtagagccacatattgttggtgaattattaagacccttttaaaaatcattcatggtagacttcaagagtcataaaaaagattgcatcatctgacctaagactttcggaatttttcctgaacaaataacagaaagggaattatataccttttaatattattagaagcattatctgtagttgtaaaacattattaatagcagccatccaattgtatgcaactaattaaggtattgaatgtttattttccaaaaatgcataattataatattattttaaacactatgtatcaatatttaagcaggtttataatataccagcagccacaattgctaaaatgaaaatcatttaaattatgattttaaatggtataaacatgatttctatgttgatagtactatattattctacaataaatggaaattataaagccttcttgtcagaagtgctgctcctaaa

SEQ ID NO: 106 - DNA, 3097 bp, Homo sapiens
ggctcactggggaagactgccgggatccaggtctccggggtccgctttggccagaggcgcggaaggaagcagtgcccggcgacactgcacccatcccggctgcttttgctgcgccctctcagcttcccaagaaaggatgacacttctgtggtgtgtagtgagtctctacttttatggaatcctgcaaagtgatgcctcagaacgctgcgatgactggggactagacaccatgaggcaaatccaagtgtttgaagatgagccagctcgcatcaagtgcccactctttgaacacttcttgaaattcaactacagcacagcccattcagctggccttactctgatctggtattggactaggcaggaccgggaccttgaggagccaattaacttccgcctccccgagaaccgcattagtaaggagaaagatgtgctgtggttccggcccactctcctcaatgacactggcaactatacctgcatgttaaggaacactacatattgcagcaaagttgcatttcccttggaagttgttcaaaaagacagctgtttcaattcccccatgaaactcccagtgcataaactgtatatagaatatggcattcagaggatcacttgtccaaatgtagatggatattttccttccagtgtcaaaccgactatcacttggtatatgggctgttataaaatacagaattttaataatgtaatacccgaaggtatgaacttgagtttcctcattgccttaatttcaaataatggaaattacacatgtgttgttacatatccagaaaatggacgtacgtttcatctcaccaggactctgactgtaaaggtagtaggctctccaaaaaatgcagtgccccctgtgatccattcacctaatgatcatgtggtctatgagaaagaaccaggagaggagctactcattccctgtacggtctattttagttttctgatggattctcgcaatgaggtttggtggaccattgatggaaaaaaacctgatgacatcactattgatgtcaccattaacgaaagtataagtcatagtagaacagaagatgaaacaagaactcagattttgagcatcaagaaagttacctctgaggatctcaagcgcagctatgtctgtcatgctagaagtgccaaaggcgaagttgccaaagcagccaaggtgaagcagaaagagtttccctcttgttgcccaggctggagtacagtggcgcgatctcggctcagtgcaacctccacctcctgggttcaaatgattctcctgcctcagcctcctgagtagctgggattagaggcacccgccaccataccagcgaattttttttttcttttcagtagagattgggtttcaccaaattttgttcatatctttgttcatgaaggatattggtttgtttggtttgtagtattcttttcttgtaatgctgtgactaatgtgagggttatgctggtctcattacatgagctgggtaatgttccctcttttgtgattatgtgaaagcctatgggtaaaactggtattatttcttgctcaaaagaattactcatataactatctgggcctgttgtgtttttttttttgttgttgttttttttgagaaggagtctcgctctttcgcccaggctggagtgcagtggcgcgatctcggctcactgcaagctcggcctcccgggttcacgccattctcctgcctcagcctcccgagtagctgggactacaggcgtccgcctccacggccggctaattttttgtattttcagtagagacggggtttcactgtgttaaccaggatggtctcgatctcctgaccttgtgatccgcccgcctaggcctcccaaagtgctgggattacaggcgtgagccaccgtgcccggccgttgttttctttttgggaaagcttttaattatgaattcagtgtcctttttagttattgagattttctgtttcttcttgtggcagttttggctttcaaggcatttttttccatttcatctaagttgtcacattattggcatacttttctttagattatttcctattatccttttaatgtctgcaggatttttagtgatgttccactgtcactcctgatattagtaattggtgttttgcctttttttgtccttcatcagtcaagataagggtttctcaattttgctaattttttcaatgaacatatttttattgatttttctctgttgtttatatatttatttactttattcatatacttattttcctctttttgcatactttgcacttcattttctttttgtcagtcatcctaaaatgtaagctgtatcactgatttttaagtaattcttcttttccaatataagtattctgagctatgtgttttcctcataggattagtttaactaaatccaacaaatgttgaaatgtcgagtttttgttattattaagttcaaaatactttctaatttctgttttcatttctttttgacctaagggttatttcagtgtgtgttttttaatttaaacatgcttggaattttccagatcgttttactacattatatatgaaaattcatttgaattttagagttggctttatgttcactcttgatagttatttgtaacatttcatattgtcatttaagtttagctaatgtaaaaaattagaaaaaaagtctgggagcaggtatctccaacttagaactacctgagagaactacattacggagtggagaaacataggtttttgttctagatagacctgggttcaagttccggactcagtgctggctgtgtatatgaactagtacaagccttccttttcttatccttcaggttcaatttccagggtatctgtgaaaaccgagggaatggggaatgagagctttgccacagtgctgcacacttgattctaatttctaatcttttatttaattctgatgtgtccaaagaacatactttgcatgattttattctttttaagcttattggtacttaaaaaaaaagtatttgcagactgcctatcttggtaaatgtttgatatgcatttgaaaaagacatatattttgtagtttcgagtggtgtccagtaaatgtcaactaagaaaa

SEQ ID NO: 107 - protein, 570 aa, Homo sapiens
MTLLWCVVSLYFYGILQSDASERCDDWGLDTMRQIQVFEDEPARIKCPLFEHFLKFNYSTAHSAGLTLIWYWTRQDRDLEEPINFRLPENRISKEKDVLWFRPTLLNDTGNYTCMLRNTTYCSKVAFPLEVVQKDSCFNSPMKLPVHKLYIEYGIQRITCPNVDGYFPSSVKPTITWYMGCYKIQNFNNVIPEGMNLSFLIALISNNGNYTCVVTYPENGRTFHLTRTLTVKVVGSPKNAVPPVIHSPNDHVVYEKEPGEELLIPCTVYFSFLMDSRNEVWWTIDGKKPDDITIDVTINESISHSRTEDETRTQILSIKKVTSEDLKRSYVCHARSAKGEVAKAAKVKQKVPAPRYTVELACGFGATVLLVVILIVVYHVYWLEMVLFYRAHFGTDETILDGKEYDIYVSYARNAEEEEFVLLTLRGVLENEFGYKLCIFDRDSLPGGIVTDETLSFIQKSRRLLVVLSPNYVLQGTQALLELKAGLENMASRGNINVILVQYKAVKETKVKELKRAKTVLTVIKWKGEKSKYPQGRFWKQLQVAMPVKKSPRRSSSDEQGLSYSSLKNV

SEQ ID NO: 108 - protein, 356 aa, Homo sapiens
MTLLWCVVSLYFYGILQSDASERCDDWGLDTMRQIQVFEDEPARIKCPLFEHFLKFNYSTAHSAGLTLIWYWTRQDRDLEEPINFRLPENRISKEKDVLWFRPTLLNDTGNYTCMLRNTTYCSKVAFPLEVVQKDSCFNSPMKLPVHKLYIEYGIQRITCPNVDGYFPSSVKPTITWYMGCYKIQNFNNVIPEGMNLSFLIALISNNGNYTCVVTYPENGRTFHLTRTLTVKVVGSPKNAVPPVIHSPNDHVVYEKEPGEELLIPCTVYFSFLMDSRNEVWWTIDGKKPDDITIDVTINESISHSRTEDETRTQILSIKKVTSEDLKRSYVCHARSAKGEVAKAAKVKQKGNRCGQ

SEQ ID NO: 109 - protein, 346 aa, Homo sapiens
MTLLWCVVSLYFYGILQSDASERCDDWGLDTMRQIQVFEDEPARIKCPLFEHFLKFNYSTAHSAGLTLIWYWTRQDRDLEEPINFRLPENRISKEKDVLWFRPTLLNDTGNYTCMLRNTTYCSKVAFPLEVVQKDSCFNSPMKLPVHKLYIEYGIQRITCPNVDGYFPSSVKPTITWYMGCYKIQNFNNVIPEGMNLSFLIALISNNGNYTCVVTYPENGRTFHLTRTLTVKVVGSPKNAVPPVIHSPNDHVVYEKEPGEELLIPCTVYFSFLMDSRNEVWWTIDGKKPDDITIDVTINESASSKIHSGTGLWFWSHSPASGDSHCCLPCLLARDGPILPGSFWNR

SEQ ID NO: 110 - protein, 385 aa, Homo sapiens
MTLLWCVVSLYFYGILQSDASERCDDWGLDTMRQIQVFEDEPARIKCPLFEHFLKFNYSTAHSAGLTLIWYWTRQDRDLEEPINFRLPENRISKEKDVLWFRPTLLNDTGNYTCMLRNTTYCSKVAFPLEVVQKDSCFNSPMKLPVHKLYIEYGIQRITCPNVDGYFPSSVKPTITWYMGCYKIQNFNNVIPEGMNLSFLIALISNNGNYTCVVTYPENGRTFHLTRTLTVKVVGSPKNAVPPVIHSPNDHVVYEKEPGEELLIPCTVYFSFLMDSRNEVWWTIDGKKPDDITIDVTINESISHSRTEDETRTQILSIKKVTSEDLKRSYVCHARSAKGEVAKAAKVKQKEFPSCCPGWSTVARSRLSATSTSWVQMILLPQPPE

SEQ ID NO: 111 - protein, 687 aa, Homo sapiens
MTLLWCVVSLYFYGILQSDASERCDDWGLDTMRQIQVFEDEPARIKCPLFEHFLKFNYSTAHSAGLTLIWYWTRQDRDLEEPINFRLPENRISKEKDVLWFRPTLLNDTGNYTCMLRNTTYCSKVAFPLEVVQKDSCFNSPMKLPVHKLYIEYGIQRITCPNVDGYFPSSVKPTITWYMGCYKIQNFNNVIPEGMNLSFLIALISNNGNYTCVVTYPENGRTFHLTRTLTVKVVGSPKNAVPPVIHSPNDHVVYEKEPGEELLIPCTVYFSFLMDSRNEVWWTIDGKKPDDITIDVTINESISHSRTEDETRTQILSIKKVTSEDLKRSYVCHARSAKGEVAKAAKVKQKVPAPRYTVELACGFGATVLLVVILIVVYHVYWLEMVLFYRAHFGTDETILDGKEYDIYVSYARNAEEEEFVLLTLRGVLENEFGYKLCIFDRDSLPGGNTVEAVFDFIQRSRRMIVVLSPDYVTEKSISMLEFKLGVMCQNSIATKLIVVEYRPLEHPHPGILQLKESVSFVSWKGEKSKHSGSKFWKALRLALPLRSLSASSGWNESCSSQSDISLDHVQRRRSRLKEPPELQSSERAAGSPPAPGTMSKHRGKSSATCRCCVTYCEGENHLRNKSRAEIHNQPQWETHLCKPVPQESETQWIQNGTRLEPPAPQISALALHHFTDLSNNNDFYIL

SEQ ID NO: 112 - DNA, 75171 bp, Homo sapiens
ggtttccggagctgcggcggcgcagactgggagggggagccgggggttccgacgtcgcagccgagggaacaagccccaaccggatcctggacaggcaccccggcttggcgctgtctctccccctcggctcggagaggcccttcggcctgagggagcctcgccgcccgtccccggcacacgcgcagccccggcctctcggcctctgccggagaaacaggtgaagggggtgcagggtggggccgttggggaggcctggggacccgggggctccgcagcggcagggggcctctgggaccttggggatgttgtgatggacgctgcagtggggccgggagagatgaagagacgcggagggtcgccctgagggaagactcttcgggatgacaggagcgggcctcggaagggactcggggcgctggagggaagtttcgttcttcggagaaacagaacgcgctcgagggggcaccgtggggcgagggcgcactcggttgcggcggcaggagtgagggacagtcccccgatttcctgctccctggggccctggggacgttccggccaccggagcgactgtcacgccgacggggatcaccggcgcgagtggggggtcggaaagcgcctcctccccgcccggtcggcggctcccgctgagccacttcctccgcttgccctgttcccgctccttcaggagacagctgtgcccttttggaggcaggaataggtgtgtctgtcgcctgcagccttacgggctggctggtcgtgggtaggctttattgcataagaatcaagtttcctgtagggaaattgacagaccggtactctttctaaattccctcgcatctttttctaggttaaattatgctccccccacgtccccgccttgtaaaaaagagaaaaaaagacaaaataaaatccccatcaacccgtcaagccagctctagagagagaaataaacctcttgacattgtccttttccaaatacctggtaaagtcggccagaagataaataattgagccattgcatttactggattgtggtgttgcttaattgcataggacggaatgaaccaattgagagtgggagttttctgtctcagagccaagatcttgggtaaatgcagaggagagggaaacaaagacaggctggccttgaaaaaaccatgtgtgcaaactttacatgcatttggggggtgtggttgcactgaagttaacaagattcaaaccgtcgcccaagttggtatttccatgtttggtacacatcactctgtgccatatcaggtcgttgttaagtgtggtgacaaaatcagtggttagtcatttttttaattaaaaatgtgtatagtgtgtacctgctggtcttactgtatgtgcaactaaaggtttacatagtctgtgtatgggttgtaaatttttggctggctgtgctgataaagcattgggcttgaataaagcaaagcagaaaatcatctcaatcttttatatgtggatttagactgtgttatgacttggttcagccagttttctatcttattttatattaaatatgtctgtgttctctgagtcagcacatttatttccttattacatgttccagacaggagtgctagcccagtttttgttcagtttgcacagtgggatggggaaacaagtctggaatttaaaaaaaaatgttttagaggttggagccttgattttagtctctatattagcacatccatcacaaagaaccattagtaaattcatgaatcttttgttttttatgtagttcatttgagaagaataatcacttagaaatatccacagtgccaggcatggtggtgcacacctctgatcccagctaattgaaggctgaggtgggaggattccttgagtccaggagttgagtctggtctgggcaacatggtgagaggccaggaattgggtctagagtctagtctaagcaccataatgagaacccatctttaagaaagaaagaaaggaaaggaggaagaaaggaaagaaaaagaaatacccacagcacagttatgaattaacccacaaaggacttgtgaggtgggtagttcacataacaattaccctaatatcgtagataagaaaattgaggccaaaggatcaagacacttggccaacgcagcagagtgccatagtggtggaatttgtgcctccttctgtatattttgtgaaaagtatcagtgaaattctttttttttttttttttgagtcagagtcttgctctgttgcccaggctagagtgcagtggcgcaatcttggctcactgcaacctctgcctcctgggttcaagcgattctcctgcctcagcctcccaagtagctgggactacaggcgtgcgccaccacgcccagctaatttttgtatttttagtagagaccggggttttaccatattggccaggctggtcttgaactcctgaccttgtgatttgcccacctctatctcccaaagtgctgggattacaggtgtgagccaccgcgcccagtaagtatcagtgaaattctaacatatatctgaacagtaaaataccaccaataggctgaaagacttcatgggaggtaaatattcaataaacaggtgaaaaaagaaatacaaatggagcttgcttagattatttttctaattgctatgtctaacttgggaagtgaggaactgtttttggtcagcataatttaccatcagaatttagctatttactaatgaaaagaaatactaatctaggtttgttttagattaaggacagtcatgacctaaatgtcatttaaaccagagtgcattgtggcttgatcagtggtcatttctgtctctagaaagttgctttaacttctctgcctctacgtgtctcttgacattcagatatgaggtggggtagaggtggtgaccaactttccagacgcctgagtccaaaccttcttagcttatggttttcttaggtgatgtgcaaatcaacaaatatatacttttttttttttttttttgagttggagttgcactctatcacccaggctggagtgcagtggcatgatcgtggctcactgcaacctcctcctcccgggttcaagtgattctcgcacctcagcctcctgagtagctgggattacaggtgcccgccactacgcccggctaatttttgtatttttagtagagataaggtttcactatattgaccaggctggtctcaaactcctgacctcaagagatctgcccacctcagcctcccaaagtgctgggattacaggcgtgaaccaccttgcctggccaacatatatataccttttgcaactttgtcagagttgctatgaagaataagttgtatcttgttcacagaaattgcagtctactgggggagctgataaatgttttaaccatccaatgtaacatgttgtcatcaaagagatggtgagactttacacttgtgctaacaaggtagctgttctacataaaagaacatacagtacagatgtagaacttttctgttatcatagaacgttctattggacagtgctaggctgaatgctacagatcttcagagaaaggagaggttatgaggcctggagttgtctagaaagtctttttgccaaagagggatttcaactgggtcccaaataatgggtggaatttgataggtgtaaagaatttgcggtggtttatgcctgtaatcccagcactttgggaggctgaggcaggaggattgcttgagcccaggagtttgagaccagcttgggcaacgtggtaaaactccctctcccctaaaaataaaaaaaattagccaggcctggtggcgtggacctgtagtcccagctactggtgagactaaggtgggaggatcacccaagccccgggggttaaggctgcagtgagccgtgatcccgccaccgcactccagcctgggtgacagagtgagaccctgtctccaaaaaaaaaaaaaattcctggtagcccggtagactaggagggtaagtaggggagaagtgattacttacaaaagacattgaatacaggaccaaggaatttcagttctgttcttttgtaggggaagcttttaaaactttcggggcgccgggcgcggtggctcacgcctgtaatcccagcactttgggaggcccagacgcgcggatcacgaggccaggagatcgagaccatcctggctaacacggtgaaaccccatctctactaaaaatacaaaaaaaagtagccgggcgttgtggcgggcgtctgtagtcccagctactcgggaggctgaggcaggagaagagcgtgaactcgggaggcggagcttgcagtgagccgatatcgcaccactgcactccagcctgggcgacagagcgagactccgtctcaaaaaaaaaaaaaataaataaataaataaataaataaaactttggagccgaagcactgatgtttaatcatagagtgcttactatgtgttaggcacaggcctgattgcctgatgctggttaatttgtacaaagtaaatcagtgcatatgccctctgccctaggggagttattaactggagtctgacattgtacaaaggtaggtatcctgactagtttgatttggtactttgggtgaaaaaagtatagtgtgcttaagtgcagaagtgttttttgaggatttttgattggatacaaaccaccactcatattttatgtctttggcacttaaaaatttcaccataacttttgagtcatttataaaaaccactgaaagagtacttgagggacatccccgaatcctgaagaacttctggtgttctggagcagcctcagtgagatccaggaggatggcattgctgggctggcccagcccttattgattatggtgtaaagaattaatatggtggttatatactctttgttagacaccttggcttacaagacgtaagcgtaaagtgtagtgcgctttagtcagtatggccacatggtcctttggtggtaaattgtttgagatgcctccagtttttaaaaggagtagcatatcgggccaggagcagtggctcatgcctataatcccagcactttggaaggccgaggcaagaggattgcttgagcccaggagttcaagaccagcctgggcaacatagtgagaccactttgtttctttaaaaaaaaaaaaaaggcaaaaacaggctgggcatggtggctgatgcctgtaatcccagcgctttgtgaggcagaggtgagcggatcacttgaggtcaggagtttgagaccagcctggccaacatggtaaaaccccgtctctactaaaaatacaaaaattagccaggtgtggtggcacacgcctgtagttccagctactctggaggctgagccaggagaattgcttgaacctgggaggtggaggctgcagtgagccaagatcctgccactgcactccagactgggggacagagtgagacattctgacagtgctacactgaatgctacatgtcttcagaggaaggagaggttatgaggcctgggaataacatatggaagaatgaatttctgttatggtcagttctcatttgtcatgttaggattactgcaactcttacccagccgggtgtggtggctcatgcctgtaattccagcactttgggaggctgtgggcggatcacgaggtcaggagatcgagaccatcctggctaacacggtgaaactccgcctctactaaaaatacaaaaaattagcccagcgtggtggcagacgcctgtagtcccagctactcaggaggctgaggcaggagaatggcatgagtcctggaggcggagcttgcagtgagctgagatcgtgccactgcactccagcctgggcaacagagtgggactccatctcaaaaaaaaaagaaaaaaaaaaggattaccgcaactctttaattcagatcagcaaacatgttgagagccaggtattgcgtcaggcaggatccaaggataatgaaatattgtccgttttcatgaaactggagatgttgcagggaccgaggtgtgtgctatgccagtatggaagtaggacaggggagacgacagggcagtgagtggttcaagactctggctctgaagtcaaacagatctgggactgaatcctggatctgccacttcctagtcagaatctgagcctctattttcttatctgtaaaagaagattataacagtgcttatcttgtaggtactgttgacgattcaataagataatgtggataaaatgcttagcatagtgcctggcacatagtaagagctcggtaaatctaagttcttactaaatatccaagaaaagagattaattcttttcaggagtgagagaaagtcatcattattgaggggctttatcagatgggaacacctgaatagggttttataggatgaataggaattctttccacgaagttgcgttacaaaaagttgcattcaaggctgaaggaacatgagggtgcagaggcttaaaacagccttgtgtgttcagggagctataagtagaagttcttaatttaggagaactaaaccaaggggaaaggaggccaaggaaccacagttcttatcccttttctgttaataattgggtttaaatgtcattaaaataagttattttgtcctttttagaaaagtaataacatgctattataaaaaaaaagacttgtaggaatataaaatgtgtgttttacatgtatcctgttaattgacttgcttttattcagattttttgcagccctttctgtttaccaggttatcttggagacatatttattccaaattcctttttttttttttttttgagatggagtctcgctctgtcgcccaggctggagtgcagtggcgctatcttggctcattgcaagctccgcctcccgggttcacgccactctcctgcctcagcctcccgagtagctgggactacaggcgcccgccaccacgcccagctaatgtttttttttttatatttttagtagcgacagggtttcaccgtgttagccaggatggtctcaatctcctcacattgtgatccgcctgcctcggcctcccaaagtgctgggattacaggcgtgagccagcacgcctggccttccaaattccttttaacagcctagcaaaagaataataaggaaggtaaatctgcccctacaagaaaataatgcttcgacgatccggctttccttcctgctacccccagccataagaataaatgaccttgctcatcactgaaattttacctgacctttgaatttttaactgcgtcagccaaagaacttatattttgagtattcctaaggtgattgctattgtagttttgaaacacttggttggtatgtttgagggtttcatggtccaaagttactatagcagttaaaagagtggactatcaggtcagacctattgggctttaatcccagttctgccttctcttagaccttgggcctgttgttttcacttctctggttttcagtttctctgtccacaattgtggaaacgaggtccacttgtagagtaattgagaggatgaagcaagatgatgcatatcaagtactttgcatagtgccgggcagacaggtaacattcaagtgctaataattactattattactatttattttttgagacaggttctcactctgtcacctaggctggagtgcagcggtgagatcacagctcatgacagccttgacctcctaggctcaagtgatcctcctgcctcagccttcggggtagctggggctacaggtgtgtgctaccaccctcagctaattttctaatttttttgagtcaggatctcgtcacgttgcctaggctgaattactcttattaaaaactataatatcaggccgagtgcggtggctcacgcctgtaatcccagcactttgggaggccaaggcgggtggatcacctgaggtcaggagttcaagaccagcctgcccaacagagtgagaccccccccgtctctactaaaaatataaaaattagccagttgtggtggtgggcacctgtaatcccagctactcgggaggctgaggcaggataatcgcttgaacccgggaggcggaggttgcggtgaaccgagatcgtgccactgcactacagcctgggtgacagagtgagactctgtctcaaaaaaaccgaaaaacaaaaagcataattagggtggtaacgcttatacataggggcaggtggaataaaacataattaggaggtcgggcatggtggctcacgcctgtaattccagcactttgggaggccgaggcgggtcaggagttcaagaccagcctgcccaacatagtgagaccccgtctctactaaaaatataaaatttagcctgttgtggtggcgggtgcctgtagtcccagctacccgggaggctgaggcaggagaattgcttttgaacccaggaggtgggggttgcagtgagctgagatcgcgccgctgcactccagcctgggagacagagcaagactccgtcacaaaaacaaaaaacaaaaaactgtcatatcaaaaactaaactaaaatggtaatatctgttagatattacaaagtcaggcaaattatgattcatggcagccactaatgacccaaaggagagaaagaataattagcagattctaacctaatgggaaaaaaactaaatgaatagggatgggggacttacattctgttagaggaaattgaggctgtcatataaaaggaataggtaaggcaaactgtaaattcctgtttacacaaatgcccttctgataaatctctgcattgcccacagtccatgattacctctcccttattttaagtaatatttaacacattaaaaatggattaccacccaaggaattgctcccgacccagaaagtgcaggtagtgttgaaggtttgaggggaagaggaatgattagagttggttgtgtctcaggaagaagccaacaggaggaaccttattttgagtcaggtaaagaaggtgggagtgaggaggcatcccggtggccaggtatgaagctgggagctgattgctgcacattactcagctgaattaaatgtgccctcacatctgtgtgtgtgcgtacatgcaaatgtacatgtgtatgagttagttggaggggtagacctttattttcctgtcctgtaactttcctttgcaaactaatctgtattcagaacagtgttgcagttaagaaccacccagcttgtccatgaaacaggttctctcaccccatctccccagttttagagaaggcaggaaagaaaaggcagtgcttttcttttttcctggccgtatgcggggcaggaagaagccagcagagcttgaaagagaaagtaaaccttctgggaaataaacggcttggcttccctattgtggaggaggagtgcaaattattagggggatgtttgggtagtttttgtagaagccatttctgaaaactgatttggattagtgaaggtaagcccaatttaggaaaaccctgcccagtctggtgtcagccacctgtttcccgctttgtttgattgatttgattagtttgtggtattctgacctctcatttttattacaagagttggaagatttgagtctgaacttgagcacctgcttcggtgaaagcttcctaaaatgcatgttttttcacattttttctcatgttcattttgttttgctttttagcaaacactttttctgacagaatctaaaagcattagacttttcttgttttccccttctctccccacaatgtaatcttgaaaacccaaatgttagctgtgtaaattacctctcccgtaaaccaaacaaagtgcaatattgcattgagttagcattgaaatagtcggcctttgaatttttttctacttgtggtttagacataataaatatttcatctcagactgactttctcgacaaatcagttttgcatttgggcctcttttcatcagtatgtttagggaaagcacatttattgaaacattaaccaaaatgaaacataattaggaggccgggagcgatggctcacgcctgtaatcccagcactttgggagaccaaggcatgtggattgcttgaggtcaggagttcaagaccatccttgccgacttggtgaaatcctgtttctactgaaaatacaaaaaactagctgggtgtggtgacgcgtgcctgtaatcccagctactctggaggctaaagcaagagaatcgcttgaacctgggaggcagaggttgcagtgagtcgagatcgtgccactgcactccagcctgggcaacagagactccgtctcaaacaaccaaaaaaacaaaaacaagcataattagggtggtaacgcttatacataggggcaggtggaataattgaagcattctggagccagaaataatcaactgattaagaataatctggctgggtgcggtggctcacgcctgtaatcccagctactcaggaggctgaggcaggagaatcgcttgaacctgggaggtggaggttgcagtgagccgagatcgcgccattgcactccagcctgggctatggagcaagactccatctcaaaaaaaaaaaaaaaaaaaatcctgtttctgcagaaatatcccaggtgtcctgggtcagcagtgccccatagattccacggacgtttaccctaagttttccaatgggagttcatacctctatacccagtgagaatattttctgagtaatgggaatgagattggagatgtagggtagagaagatccatacagtctttgggttaaactttttcctctttgcctaggaaagattaatgctaatcttaaccacagatttgtagtaagaatgtatcagttttgtcattcagttctagactccagttttctttattgtaataccaatattttagagtaaattttgaaatgaatcagtacaaaagatatgtagtaagtggaaagttagtccgcaccttatccttgggactctttcccagggacagctagttacctactatttatctctcctgagttacttcatatgtatgcatgcaaacatgttattctctgggtgttgttccttccatatatagcagcaaatacaccaaactctgtattttgctttttgtcactttatcttagagaatactcaatgcaaatacatgtgtatatacctcatgtttaaaaaatctacatagtaaaattagccaggcatggtagtgtgtgcctgtaatcccagctactcgggaggctgtggtgggagaatcacttgaaccctgagatcacaccactggactccagcctgggccacagagcaagattctgtctcaaaaaacaaaaacaaaaacaaaaaaactacagagtagtattctaggctatgcatatcataaatttgatttcctaatgataggcatagatgatttgcctgggcggcaaattagcgttggctgtgtctcaggaagaagccaacaggaggaaccttattttgagtcaggttccaaagacagaaacattgtctgacatttgtttttgggcttatatgaataaatctgtacacatatatttttaatgttttaatcgtaatatgtatactatttggaaatgtggctttttagttaacagagtgcatgttttaccccattgcacttaaacattaacttggggataattaaatgagtctgtcacttggacaggcaggaattgtaccccccacaaacccataaaccgccaattttttttttttgagacagagcctcattctgttgcccaggctggagtgcagtggtgcgatctgggcccactgtaagctcagcctcccgggttcatgccattctcctgcctcagcctcccaagtagctgggactacaggcgcccgtcacaatgcccggctaattttttgtatttttagtagagtcggggtttcaccatgttagccaggatggtctctatctcctgaccttgtgatccgcccgctttggcctcccaaagtgctggaattacaggtgtgagccaccgcacctggccggtttttttttttttttttgagatggagtcttgctctgttgccaggctggagtgcaatggcatgatctccgctcactgcaacctccacctcccgggttcaagtgattctcctgcctcagcctcctgagtagctgggactacaggcgtgtgccaccacgcacagctaatttttgtaattttagtagagatggggtttcattaataatcattaatattagacaactgtcagactcacagtggtggatacaaactttctcaaattctgatttttactctaaagctcaaattttatcattggcaacaaatattgtcagttgctttccctgaacagacagcttcccttctttcatttttgagaaaatatctgccagtatcccagttggtttatcaatcattctttctctttttttttttgagacggagtctcactctgtcacccaggctggagtgcagtggcatgatctcggctcactgcaacctccacctcccaggttccagcaattctcctgcctcagcctcccgagtagctgggattacaggggctagcagccacacctggctaatttttgcatttttagtagagacagggttttaccatgttggccaggctgatcttgaactcctgacctcatgatatgcccaccttggcctcccaaagtgctgggattacaggtgtgagccattgcgcccggctctattatttcttttctttctttctttttcttttttttttttgagatggagtttcgctcttgttgcccaggctggagtgcaatggcgcgatctcggctcaccacaacctccgcctcccgaattcaagtgattctcttgcctaagcctcccgagtagctgggattacaggcatgtgccaccacacccgtctagttttgtatttttattagagatgggggtttctccatgttggtcaggctggtctcgaactcccaacctcaggagatctgcctgcctcagcctcccaaagtactgggattacagttttgagccacctgacccggtttgcttattatttcttttaaatttaaaaaataataaataaaggggccatgagagcgaagagtttgagaaaggttggtctaaaggttttaacataagaatccctgggttatttgcttaaaaagaagaaagaatctatggatctgcctgagagggtctgatgtagtttatctggggtcatcctcacaggcatagcagatattctgattcagatggtccttggtccttagtttgagaaatgtggctttacaaggcccatagaatataaagtcttctttggattagtgaagtcatgtccacagggtttagaaaatgtttttgttttagagataaaggtaagtggaagagtagacatgtagtgaatgagggaaaatgttttagagatttctttttattctgtttactcttcttggtatgcacgtacctgaatattaaggatattttatgaagtcatgacattaccagattaatgttggttttgttttaaggtactttctgactgctggggttaattcctacagacgattctggtaaagaatagcctttaagttttaaaagtgttgacttatttcagatgtcttaataaagttaacttccagttattacatgtaacgtatataaagctctcattttcctttattctcgttaattgtttgcataacaaattcaaagggaaatttgcttggcagagatcagatagcagagatgagatttaaaaacaggtaatttggctactagcctgggagtttgaagattccaagtttgcatccatgtgtagtcacttaacatttctgtccttatctgtaaatgggaataacacctacttgatagggttgttacattatcttggccacctcaggttctctttggctgagtgattgactggaaaacgcaatgtgaattcatgcttcagactgggttcttttttttttttttttttgagatggagtttcactcttattgcccaggctggagtgcaatggcacgatctcagctcactgcaacctctgcctcccaggttcaagcgattctcctgcctcaggctcccgagtagctgggattacaggcatgcaccaccatgcctggctaatttttttgtatttttagtagagacggggtttcactgtgttggtcagactggtttcaaactcctgacctcaggtgatccacctgcttcagtctcccaaagtgctgggattacaggcatgagccaccgcacccagcccaggctaggttctatatgggtgtgctttttagaatttagatcatgggctatccccaacacaaactggataatgtttctttctagattctctctaagcgtgtattctctttctttcctaggcacagccaccacttcacttacattgtgggattataatttcatgagtagtggaatttccttaaccttctcttgtgtgggagctgaaggacaaaatgagatattctctgaagagtggttacatcatgcaaaactatgatgtgtaatgaggtcacttagttttctaagtacattatacattttgataagattttcatagaaaagcttgtctccttggggagatcactcatcttccatcttgactattatttaaactttatgggtcagatttatctttttaaaaacttaaccataaagctcaattaattttttttttttttttttgagacggagtctcgctctgttgcccaggctggagtgtagtggcgcgatctcggctcactgcaagctctgcctcccaggttcatgccattctcctgcctcagcctcctgactagatgggactacaggcgcccgccacgatgcccggctaattttttgtatttttagtagagacggggtttcaccgtgttaggatggtctcgatctcctgacctcgtgatccacccgcctcggcctcccaaagtgctgggattacaagcgtgagccaccgcgcccggctcaattaatatattttaaaaattaatagactttattatttttattttattttatttttgaggcagagtctcgctctgtcacccaggctgagtgcagtggtgtgatcttggctcactgcaaactccacctcccgggctcaagtgattctcctgcctcagcctcctaagtagctaggattacaggtgcctgccaccatacccggctagtttttgtaattttagtagatacgtgttttctttcttttcttttcttttttttgagatggagtttcactctttttgcccaggctggagtgcaatggcatgatctcggctcactgcaacctccgcctcccaggttcaagtgattctcctgcctcagcctcccaagtagctgagattatagttgtctgccaccacgcctggctaattttttgtatgtttgatagagacagggtttcactatgttagccaggatgtctcgatctcttgacctcgtgatccgcctgccttggcctcccaaagtgctgggattacaggcgtgagccactgcggccagtctagactttattttttaaagcagtgttagttttacagaaaaattatgtggaaagtacagagagtttccatataccccttactttctcccacaacttctattattaacatcttgcattagtatagtacgtcccttacaactaatgaaccaactcgatacattattattaaccaaattcctgagtttattttatttctatttttattttattattattattttttagaggtagggtctcactgtgttgtccaggccaggttgcagtggcatcatcatagcttgctatagcctgaaactcctgggctcaagcaatcctcctgcctcagtctcccaaagtgttggaattacaggtgtgagccactctgtccagcctgaagtccatagtttacattacatttcactctgttgagcattctatggattttgacaaatgtgtgatgatgtatatttgccagtacacaattatataaaatagttttactgccctagaaaccccctgtgctccacctattcattcctctgctgaaccactggcaaccactgatcttttataatatctccatagttttgtcttttccagaatgtcatatagttggacatacagtgtgtagccttttcagattggcttctttcagtaaatgatatgcatttcaggtttcttcatgtttttttgtggcttgataggttgtttcttttcattggtgagtaatactctattgtatggatataccacatgttgtttatcaaacattcacctgaaggatagacatcttggttgcttccaagtttgagcagttatgaataaagctgctataaacattccagtgcaggacttttcacctcctctggataaatatcaaggagtgcaattgctagatcatatggtaagagtatgtttagttttgtaagaagctatcaaactatattcaaagtgactgtaccattatacattcccatcagcagtgagtgagagttcctgttactccacatcttcaccagcatttagtggtgtcagtgttttggattttagccattttaatgggtgtataatggtatacctattaaaattggttttttttggagacagagtttcacagtttcactcttgttgccctggctggagtgcaatggcgcaatctcggctcactgcagcctccgcctcccagtttcaagtgattctcctgcctcagcctcccaagtagctgggattacaggtgcacgccaccatgttctgctaatttttttgtattttagtagagatggggtttcactgtgttacccaggctggtcttgaactcctgagctcaggtaatccacctgcctcagcttcccaaagtgttaggattacaggcatgagccaccgcacctggcctcaatttttttttttttttttttgagacagagttttgctcctgttgaccaggctggagtgcagtggcacaatctcggctcactgcaacctccgcctcctgagttcaagcgattctcctgccacagcctcctgagtagctgggattataggcgcccgccactacgcctggctaattttttttttttttttaattagagacgaggtttctccatgttggtcaggctggtcttgaactccccgttctcaggtgatccgcctgcctcagcctcccaaagtgctgagattacaggtgtgagccaccgtgccccgcctgttttggcttttactgtgaagacgtgttagccgctgtgatgactagcaagtgtggccctccacccagtcgctctgggctcccagctcctgcatcctgctgcaaacttgacatcttccctcaagtaacttgtagttgtctcctgtctacttgcccaaaatataactcttaaacttttctctctgcaagtttgtgcctctctccctgtctgacttccccatctaaataaatggtagaccaccatctactcctttgtgcaagccagaaatctaggaatcatccttaaattccctgttctgtcttatctctgctttcattcaaagcatcagcaaatcctgttggttctacctctgaagttttctcaaatactgttacttgactcatcctgacttttgtttctgctttatgttaggctaaatgccctgaaaactcttttgtacaaaacacctagaaatactggataaactgggcttaacagggaggcccggtgtggtggctcacgcctgtaatcccagaactttgggaggccaaggtgggtggatcacctgaggtcaggagttccagaccagcctggccaatacgtagtgaaaccccacctctactaaaaaaaaaaaaaaaaattagctgggtgttgtggtgcacacctgtaggtggtgcatgcttgaacttgggaggcggaggttgcagcgagctgagatcgcgccactgcacttcagcctgggtgacagagcaggattctgtctcttaaaaaaaaaaacaaaaaaagaaaaacaggaaaatcttcagaagcaaaaaccaaacaatctcaccaaagaaatgagaagatggctgggcgcggtggctcacgcctgtaatcccagcactttgggaggccgaggcgggcagatcacccgagatgggcagatcacccgaggtcaggaattcgagaccagcctggccaatatggtgaaaccccgtctctgctaaaaatacaaaaattagccaggtgtggtggcaggcgcctgtaatcccagctactcaggaggctgaggcaggagaatcgcttgaacctgggaggcggaggttgcagtgagccgagatcatgccactgtactctagcctggacgacagagcaagactctgtctcaaaaaaaaaaaaggctgggtgtggtggctcatgcctataatcctagcactttgggaggccaaggtgggcggatcacttgaggccaggtgaacatggcgaaaccccatctctactaaaaatactaaagttagctgggcatggtggtgggtgcctgtaatcccagctactcgggaggcgaggcaggagaatcgcttgaaccaggaggtggaggttacagtgaaccgagatctcgccaccgcactctagtctgggcgacagagcaagactccgtctcaaaaaacaacaacaaaaaaccaacacatggccaaagtgcagtgacttacatctgtataatcccaatgttttgggaggctgaggcaggaggatcgcttgagtccaggaatttgagaccagcctgggcaacatagacctcatcaccaaaaaaaaaatattttttaattagctgggtttggcagcatgtacctgtagtcctagctactcaggaggctgaggtgggaggatcacttaggcccaggagtttgatagttcgaggttatagtgagctatgatcctgccactgcactccagcctgggccacagagtgagaccctgtctcttagaaacaaaacaaaacaaaaaaaagaaactgaattaaaaacaacaagaacaaaaatgctgctttttgttattgagttgtagcccaagtttcttgagggtaaagcattgaaaagcaggcagtaatagatttgctgtttaaagagatttacttgcagcactattcacaatagcaaagacatggaatcaacctaaatgcccatcagtgacaaattggataaagaaaatgtggtacatacactgtggaatactatgcagccataaaaaacaacgagatcatgtttttgtttgtttgtttgtttgtttgtttttgagatggagtcttgctctattgcccaggctggaatgcaggtggcacgatttcagctcactgcaacctccgcctcccaggttcaagcaattctctgcctcagcctcccgagtagctgggattacaggtgccctccaccatgcctggctaatttttgtatttctagtagagatggggtttcaccgtgttgggcaggctgttcttgaactcctgacctcatgatcctcccacctcggcctcccaaagtgccgggattacgtgtgagccaccgtgctcggctgagatcatgtttttgcaggaacatggatggagctggaggctattatccttagcaaagtaatgcaggaacagaaaaccgaagaccacgtgttctcacttataagtgggagctaaatgataaggacttgtgaacacaaagaaggaaaccacagatactggggtttacttgagggtggagagtgggaggagggagaggaacagaaaagataactattgggtattgggcttaatacttaatattttatcaaaataagctgtacaacaaacccctctgacatgagtttacctatataacaaacttgcacgtgtaaccccaaacctaaaataaaagttaaaaaaaaaaaaaaaggctggttgcattgggaggctgaggcaggcagagcacttgaggccaggaattcgagaccagcttggctaacgtggagaaaccctgtctctactaaaaattcaaaaattagccaggtgtggtggtgcatgcctgcagtcccagctaccagggaggctgaggcaggagaattgcttgaactcaggaggcagaggttgcagtgagctgagattgcaccactgcattccagcctgggcgacagggcgagaccttgtctcaaaaaacaaaacaaaacaaaacaaaaacctgtcactttgggaatatctcaaacctagtcatccaagtggttgtacgattttagtgtctgcatatcaatatttagtgtgatctactttcttagattctcaaatactgccaatgggcacatgtcatgaaataatgtcttttagaggacaagagagtgctaaagtctcattattgcagtttaagaaaaacaattctgtaacagtttaactttataggaaatgccttttgtttatttattttttttcttttgaggcttagatttttatttttatgtttttagagatggggtcttcctatgttacccaggctggccttgaattcctgggctcaagtgatcttcctgcttcagcctcctgagtagctgggactagacgtccactactgctcctggctggaagtttagattttaatttaaactcttctattgggaaactttgtatgtttgctttaccacttaacatttgcatgcattattgtacctattgtctcctacttaaggaagggcagtttatgctgttatatgaagtgaattaacctcctatggtacttcagttttctctatgctaaaagtgtgttctagatttttgaaaaacttacttaattttcattcatttattcaaatatttgagcattctgtagttgctggggaaatagcagtgaactgaagaatgtctttgttcttatggggcttaagttcctagttgatcatattggaaggagatacatgaaaaaagaaatatatgaacaatggagggcgatgagtactgtaaaggagaattcagcaggggagatgttgctgttttagatagaggggtgtcaagagacattgtgcagagacctgaacgaagtgagggagcaagccatggagatatctagggaaagagcctatcaggtggagagaagagtcctagggcagaaacgggcaaggtgtgttccaggagcagagaggggacagctgtgagcaaggggagagttgtagggaaggaggcaaagagagacatctggggcaaaatggattgactggtgggccgtggtaggactttggattttttcctgagtgggttttgagcaggggaatgaaatgatctgactctggttttttttttttttggagacaaaatcttgctctgttgccgaggctgaagtgcagtggcgcaatctcggctcattgcaacatctacttcctgggttcaagctatgctcctgcctcagcctcccgagtagctaggattacaggcttgggccaccatgccggcgaatttctgtttttatttttattttttatttatttttatgtttatgttttttgagacggagtctcgctgtgtcacccaggctggagtgcagtggcgcgatctcagctcactgcaacctctgcctccccggttcaagcaacttctcctgcctcagcctcccgagtagctgagattacaggcgcctgccactacacctggctaatttttgtatttttagtagaaacgggatttcaccttgttggccaggctggtctcgaactcctgaccttaatttatctgctcgccttggcctcccaaagtgctgggatgacaggtttgagccaccgtgccagccaggactcttattttgaaaggatctgtaatgtggagaatagaaggtagagggacaaggatgaaagcatccaggccagttagcctagtccagctatctaggtaagagatgctggtggcctggattaaggctgcgtcagtgggaggttgtgagaaaggctcaccttccttttttttttttttttttttttttgagacaggatcttactctgtctcccaggctggagtgcagtggtgcaatctcagcttactacaacctccgcctcctgggctcaagtgatacccccacctcagcctcccaagtagctgggatcacaggcttgcgccactatatccggctaatttttgtatatttcgtagagacagggttttgccatgttgcctaggctggtctcaaactcctgagctcaagtgatccacccgcctcagcctcctaaagtgctgggattataggcctgagccattgtgcccggtcacttccagattttgaagacagagccaacaggatttgttaatggattaggtgtggcaggaggagggggaggaagagagagagagactggagttgaagttaaggctcatttcaaggtttttagcctcaacatgtgcaggaatggagttgtcacttgctagaatgggggagactggaggagaagccggctgggagaggtttttaatgaaggggttggctttggatacattaagtttgacatgcattttagacatccaggtggagatattgaagaggcagttggctataagtgtctgatgttcatattagcggatggggctagagacataaatttgagaattgtcagtgtataaacgttgttttgaaagaaagtggggctgaataatttagaaaggagtgcatagagaaaataagtttactattaaaatagctttaacaggccgggcacggtggctcatgcctgtaatcccagcactttgggaggctggggtgggcagatcaaaaggtcaggagtttgagaccagcctggccaatatggtgaaaccctgtctctactgaaaatacaaaaattagccaggcgttgtaccgggcacctgtagtcccagctacttgggaggttgaggcaggagaatcacttcaacccgggaggtggaggttgcagtgagccaagatcacgccactgcactccatcctgggcaacagagcaagactccgtctcaaaaaaaaaaacaaaaaaaaacaaaaaaaaaaaactttaacagcaaagcctcttcctttaaaattatgaatttttttcttatggaagttggactctttcattattaagtctacattcaatcactatgttagtaaaaatgttgttctagttgccgaatgcaataaaccagctcagacttagtggcctaaagcagcaatcatttgactatgttcgaagatgccgtgggcaggaatttagataacagcagggatggcttgtctttgctctgcgatgtctgaggtctcactgagaaaactcaagcggctgggggtaataatcatctggaattttctttactcctgtatctgatgtctgggctgcgatgactcaaaggctgatttcagctgagactgtagaccacgtgcctacttgtggcctccccttttgccttgggtttctcacagaatgtggctggttctggagaatgagacttccaatgaaatcaggtggaaatgacatctcgccgctttcagcatgctctattggttggaacagttatggacttagctagattcaaaggaagggaacaaagaccccctcctctcagagagtggggcataatgagagaatttagggccatgttatccaaccaccacaaatgccttctgaatttgaggttctgcctcaaaagttcatagttcctttgactgaaggacttctatatatccaagcatcgtcagccccaggtatattgttccatgtaagtgaccaggactaccttagtatttcgtatagggaaagtgacctgaataaatttgagaaaagaatcttccttctctccagtaagcactgaggtaagcattgagccatattataggtttatgactttgagactcagaaatttaaattcttggccaggcgcagtggctcacgcctgtaaccccaacactttgggaggccaaggcaggcagatcacttgaggtcaggagtttgagaccaacctggccaaaatggtgaaactccatctctacgaaaaatacaaaaattagccaggtgtggtggcgggcacctgtaatcccagctacttgggaggctgaggtaagagaatggcttaagttctctttatctgctttatttcagttgcctctcttagatgaatattaatgacttacatagcattttagatcagtggatgtttttgtgattcttttatttgagctttggccaaagataacagtacccacaggttttttccagctactcgctcttctcccttcagtggccctcgagcctggaaaatctgacatgacaatgtgcttgctcaacctaccactgtttttcttttgaaaagtttggcagcctgtttctgactcctatgaaggtgaattcctcagcattcacagtttattagaaaaatactttgcttctctccaaactcgaaattcaagataaccaaacctatatataggctgatctttcaggatgcagttgtcatgttgatgccatgcttttcagtatcgtggccatcatctgttcagtaggggaggtgtacttctgtaatgggaggtggtggttatgtgtgtgtgcaagtgtttatttggtgtcttaagttagcctgtgggaagttctaaatcaggatggtacgtggttgccagcagagagctgctcctcaagtgaaggaggtagaatcaaagccaataggaaagagcctcagatgcttatatatgtaccgtggggattcagagtgaaagcagtcattggactaggggtggggttagggagagcctgtctgacagacacaagaaagggatggataacgccacccagagaaaaaagcattttaggcaagaacaaatatgaaaaaggaacaaagtctgtgggtggggggcaaggaggagataagttgacttgaaggaagacaacacttatgaaagtcacctggaggctgggtgccatggctcatgcctataatcgcagcactttgggaggccgaggtaggaggacaacttgagcccaggagttcgagaccatcctgggcaacatggtgagactgagtctctaccaaaaaaaaaaaaaaaagaaaattatccagacatggtggcatgtgcctgtaatcccagttactcaggaggctgaggtgggagggttgcttgagcccaggaggttgaggctgcagtgagctgtgatcgtattattgcactccagcctgggtaacagagcaagaccctgtctcaaaaaatgaaagtcatctgtaggctggagagaggaactggaaggggctaaagttggctgagtagttacagagcctgagataagggtaaagattttgcattggacaatgagatgttagtgtgtgtttttgagctggggagtgctgtgattttactcttattgaagaatcactgaaggattattcttgaatcagtgattcttgatcattcttgaatttttcaaacagcaaaactggaagagttggcctattcctcagaatattttctaattgggcgcagtgtcctcacttgggagaacctggctacacactttagttgtaattcactccagtcgttcattcattcaatacctattttttcagcacctattatgagccagacactatgctggatgccagggttcagggtaggacacgctagtgagcaaaagccaagactcttcttgtcttcatggggctttcagtccagcatagtggttatgagtccaagttaatggagtcacagtacttgggtgcaagtcatggtgatggtgatagaaggaaggcatgtgtgagggccagtggcaggcaggagcctggtgtttttgaggacctgaagaaggagcagagtgagtgccaggaacttagccaccagctggtaccagccatacgagaggggcagagccagccaggatgtcggtcatgctagtaatgagtacaaacacttacatgctgcacgctattgggctcctgagtgctacgtgttcattagctcgatgaatttgtacagcaaccctgtgaggtaagcactgttctctcccctttctatagatgaggaaattaaggcacaaagaggataaataactggcaccagctacacgctaagtgatcgaagtggtggaaccaggattcaaatccatgctattctgccttaagataacaaatcttgttttttagcctaagaacagagcagtcatcaggagggttttaagtaggggtgtggcaagatcaagtttgtgtcttgaaaaggtctctctacccacagtgtggaaaatggcctggaggcaagcacacagatgttgggagacagttaacagctcttgccatggccccctatgcattttggctctgatgtttctgcctgatttttctcttgcctctgcctcttttcctgaggggatggcaggttttaccattcagctggagtacaaaccctgaaccctttttggttaaatatctacttgcttttcctacagtattattttgagttgctgtggctgtaatgtcttgagggaatcgagcttgacagtaatttatagaacaaacagtttttagagactgtgtggcccaattgccctctcaatgttggcactcctgccatgacatttaccatgctgagcatgtgaccgccatctgaataccaaatgccacaggaacctgggaggttgtcacttactcctccctttctctgagtcacctttgcccttcagtcagtcaccaagtcccatcacatgtagctctgtaatgtcacagaagatggatgtctgcctcaaaacacttacaatgctgctacctaaattgggcagccacgacctcccaccaggattattgcagcctgagggatctttttgaaatgtaaatcaaactatcacttgtctgtttaaagcttttcaaagacttaccccattgcccttggaagaaagtgcagatatcttgacaggagagccttctccagcctcctcttctgccgtggtctccttgtacagtctctacagtgtactgcttcattagaaccctggagattattatttgctagttctgggctaagaactggcacctggctttgtagagctcctcaggagattctgaggcgtattcagagttgagccctgatctctgctctgatttcgaggttctcgttatatttattaatgatcacgaaaaaatttattattattctttggcctcactttagcatcatctgaggaatttttttttttttttgacagagttttgctcttgttgcccaggctggagtgcaatggcgtgatctcagctcactgcaacctccgcctcccgggttcaagagattctcctgcctcagcctcccaagtagctgaaattacaggcatccaccaccatgcctgctaatgtttttgtattttttagtagaggtgggctttcacagtgttggtcaggctggttttgaactcctgacgtcagctgatccacccacctaggccccccagagtgctgggattacaggtgtgagccaccgtgcccagccgtagctttcgaaatttgaaacctggtcccactgtcagaggttccaatttggcactggtttggttcccaggcatctttcttgctgtatatattttttagtgtcagccagggtggagacctctgtattacttcatggggaagaatttgggagaagatgttgtgaggagacaggttctagtcctagagtgatttatcctttctcgtacagatttccaggtatttgaggggccactcttctgtaattcatgtttttctctcctaacctcactcctgttgcctgcatcttcttgctgagcaaaatattcaaggtcttcaactcctcacaccctggttgtccctccctggatgtgtttggttgttttagtgttccatttcaattttgatacacagaattagaatagcatccagatgtgggtctgttacagctagactactagatccttcaaaatccaagtactagtatgtctattaaaataccataagatcacattggctagttacaatggttggtttgtgggttacttaaaaatcaactaaaattctttttttttttttgagatggagttttgctcttgttgcctaggctggaatgcaatgacacaatcttggctcactgccacctctgcctcccaggttcaagcaattcccctgccttagcctcctgagtagctgggattacaggcatgtgccaccatggccagctaattctgtatttttagtagagatgaggtttttccatgttggtcaggctggtctcgaactcccgacctcaggtgatccacctgcctcagcctcccaaagtgctgggattacaggcgtgagccactgagcctggccaaaattcccactttctaatactcctgtagtagctgggtacggtgggtcacatctgtaatcccagcacttttggaggctgaggctggaggatcgcttgagcctaggagttcgagaccagcctgggcaagatggccagacgccatctctaatttaaaaaaaagaaaaaacaagactcctatagtggtgaagaacagacattccgaaaacagactgtgcgttatgattccagctccatgcctttactacctgtgttgtgactttggataaatcacttaaaaatcttttttttttttttttttttttgagacggagtcttgctctgccgcccaggctggagtgcagtggcgcgatctcggctcactgcaagctctgcctcccaggttcacaccattctcctgcctcagcctcccaagtagctgggactgcaggtgcccgccactacacctggctaattttttgtatttttagtagagacggggtttcaccgtgttagccaggatggtctcgatctcctgtcctcgtgatccacccgcctcagcctctcaaagtgttgggattacaggcgtgagccaccgcacccggccaaatcacttaaaattctgtgcctcagtttctcctctgtaaagtgggataaaaatagtacctatctgatagggttgttacaattatgaaatgagcaaataagtatgtcaagtgtttaaaacagcgcctggcttcttgtaaaaagtgctatataaatcatagctataatcattacttatttcgactgctctttaaccaaggttcttatttttcatctttttcttttgttttgaatatcacttagtgttttcaccttttactctttttaggacctagagccatcctaggtgaaatacgtatggagatatttgatcaggtcaccacccagctctcctgacctcccttctctccttaaattaacatgccaaatcacagcatcactgactccttccctcccgatatgataagagtgtgcattgaaatgcatgtattttacttagcagggaaagctgattagtgattatcacacttaacccctagtgaatctgatggattaacctgctttccaggacactaaggaaatgggtttaagataagaaatatctggctgggtgcggtggctttacgcctgtaatcccagcactttgggaggccgaggtgggcagatcacgaggtcaggtgattgagatcatcctggctaacacgatgaaaccccctctttactaaaaatacaaaaaattagccgggtgtggtggcgggcgcctggagtcccagctactcgggaggctgaggcaagagaatggtgtgaacccaggaggcagagcttgcagtgagctgagattgtgcccaccgcattccagcctgggcaacagagtgagactacatctcaaaaaaaaaaaaaaaaaaagtaagaaatgtccatgaaagggagaccctgggggaaaggaacaataactgcagctctgaggatctggcaccagcagcaccagcacagagggatgctgtacaaccattattgattttaactttacaacagttcttcaaaggagagagagttccctgttttactgaagagaaagcccatttggtagtgaaataccattcccaaagacaaatagctaataaatgtcaggcagggttttgcacccaggcccatccagctcccgtctctactgtcctttcccccacaccacactgatacagaggaatgtgtctggttggggaagtggaagtgttcccaagtggggaggtcatctgatgcacaaatttggtctgttttgtgggttttcttgttttagttttagtttttgtagagctcagacctgttcttaggcagctttaacaatcaactgtgcactcagtaattgacaaatcatgtttgttacttttaatttagagggaattaggtttgttaagctcttgctccttctttagagatggggtctagctctgtcacccaggctggagcgcagtggtatgatcacagctcactgcagtctcaatctgctcaagtgatcctcctgcctcagcctccatgggactacaagcatgggccaccatgctaggctaattttaaaaaaatttttttgtagaggcaaggtctcacggtgttgcccaggctggtcttgaactcctgagctcaagcaatccctcttccaccttggcctctcaaagtgctagaattataggcatgagccaccatgcctggcctttacttctttcatatattcaaattttgtcatattagtagggaactataactcaagttttcttatagattgatgttcatttttacaagcttgatcgtcattggtttttaattttaaagcaaatcctgttatatgtaattgaacattacagtaattatagtaatttgtttcagattgggcactcaagtgttaatattttgtctctttaggaaatcaaaactagatttatatatagacttcttattgcaagtatctagtcttaaatcttacaaaggtactatttggacttaaaactatgaaattgtgtgcttactatataagtgtacttattttgagttatgttttaaacttgaaattccattcttaatgtctagagtaattatgaatggttaaattatgaatgactctaatagtttaaagctacagtatttatttatttatttatttaatttattttttgagatggagtttcgctcttgtcgcccaggctggagtgtagtggcaccatcttggttcactgcaacctctgcctcgcgggttcaagtgattctcctgcctcagcctcccaagtggctgggattacaggtgtatttcaccatgcctggctaatttttgtatttttagtagagacaggcttttgccatgttagcctggctggtctcgaactcctgacctcaggtgacctaccctcctcagcctcccaaggattacaagcatgagccaccacacctggcctacagtattttaatgtggactctctgtcatccattatgctgtttatcctgtggtgaaaattttatgaagattgaatgtttttctctagcgtgaattgctttctcttacttttctcatttttttccttcctaatctacttgcagatacttcagattatttttagaacgtggtatggtgagaacaaataaattggggtttccaaatcttaataaattatgtggccctcagtgggattagcagggttgtattgaaaacaccaatagaaacaaaatagttcttttatgcgctttaaataaaaatttcttttcaggccaggcgcagtggctcacacctgtaatcccagcaccctgggaggctgaggcaggcagatcacctcaggtcaggagtttaagacaagcctggccaacatggtgaagcgccgtctctactaaaaatacaaaaattagccgggtatgatggcgcatgcctgtaatcccagctactccagaggctgaggcatgagaatcacttgaactcaggagatggaggttgcagtgagctgagatggtgccactgcactctagcctgggcaacagagtgagattctgtctcaaacaacaacaacaacaataacaaaacatctcttttcaggccaggtactgtggctcacgcctgtaatcccagcactttgggaggccaaaacaggagggtcgcttgagaccaggagtttgagaccagcttgggcagctggtctctatttgaacaaacaaacaaacaaacacaatactcttttcatagaaaaatgtttactacacaataaactttaaaagaatatgcagctgtattaatgctatgactccaatgtaaaaaaaaaaaaatatatatatatatatacacacacacaaacacattctgaaatagatttaaaggaattacatcaacatgtcaatttttattttttcggagacagggtctcgctgtgtcacccaagctggagtacagtggtgcaatcacagctcactgcagccttgacttcctggcctcaagtgatcctcccccctcagcctcccaaagtgctggggtcacagaccaccacacctggcaacatgtcagtttttgttctgcatagtgggatggtgggatatggatgtttttatcttttattttcttttttatatttttctaaattttccacattgaacattattttataatctttcaaacatatctcttaaaaggactggttcctatagaattcagtgcaagaaatcttctgtgtttctttatactttggttgccttgatcactgggcctttcctgacagcaaagaagaggttagtgtaggcagcagataaaacacaggtatgctctatttaaaatgcatgtatttataataaaagtataggtggtacccaaaggaaaatgtcatgacacattgcaaagtggaacagaagttatctttagatcactttctgttctggattattgtatgagcctgattttcgtctctctttccgccttccctcaccctcgttgtaaatccactagtgcatggatgtgaagtacaagtcttaactttaaaaagttttatgaagctgtgtagtaaatcccttttgtaagtggtcttgactgcgtttctcaatatatcttttggtttcattagattcaagtatataaatgagaactgtaactttggacagactttttcagtcatctttacggtaataagttcccaattagacaatagttatttgttttatgacttgctgttggtaggttatccccaagggactgagaaattcctgttttgaaaagtccaaaaagtctttgatgacttgctgtttcatttttttcttttctcttcagttatagaaaacaggattacacccaccttgcctttgtacagtgcatctactatctgctgacttaacctgagtaaatgctttgaattgagccccatataatgtcctaaggcagcctatatggagtaatgaattgtcttctctcttatgcacccagagtggtagttggcactcaagttgttcctcagataactttgtgtgttctggggctcaatgaagtagttattaagtcacaggcttggggagaacattcatcctatggcattgaatgaagtgttgcccaattctagaatgtctaataaaatttttttaaaaacccacaggcttagaattattccgtagatatgaagtaatgtagttagaacttagtggagttctttagattaacttgtaatttgaaaaaccaaaattgaaattgtgaaataacatgggctctttgaggtcttttccagtaaaacagttacagtaaagctgcttggcagtgattttcctagacactttggctagtcatctcctgtgactgctgttaattaaatatggtttgtagctaagcagcctgtaaggagaagactatggaagtatttgcatattctctccttgaaaatactacctggtctttggctttaagttatacttttattttcccctgtagaataactattaaagtattacctatggtgattagactaagaagtaaaacatgaaatcagtcattgttggtgccctggtgccttcttttttttttttttgagacagagtctcactctgttgcccaggctggagtgcaatggcacgatcttggctcactgcaacctctgcctcccaggttcaagcgattctcctgcctcagcctcccaagtagctgagactacaggcgcccaccaccacgcctggctaatttttgaatttttagtagagacagggtttcactatattggctaggctggtctcaaactcctgaccttgtgatccgcccacctcagcctcccaaagtgctgggattataggtgttagccactgtgcccagcctggtgctttaattttatggaaaaaactactagctggtttctgttttaagaaataacacaggccgggtgccatgacttgcgcttgtactcccagcagtttgggaggccgaggcgggcggatcacgaggtcaggagtttgagaccagcctggccaacatagtgaaaccccgtctctactaaaaatacaaaaattagccgggcgtggtggggcatgcctgtagtcccagctactcgggaggctgaggcaggagaatcgcttgaacctgggaggtggaggctgcagtgagccaagatcgccccactgcacaccagcccgggtgacagtatttcatctcaaaaaaaaaaaaaaaaaaaagaacacaattattgtactacttactagccctcctctgtccccagctaaaaataagaacagcaacaaccaaaaaatccttagttatgtactggaaatgaattagataattttcaataacttacacgtttttaggatatgttagtttgaaaatgcaaatattcatgcatgaccccagtgttaatctatgatggagcaggtatagtgggatgctgtttcatgatttaatttggaccttcagggagtagactgtgatgcctctgcatttgtatccaagacaaataattaaatagtctatttttggctgggcatgatgcctcatgcctgcagtcccagcactttgggaggctgaggtgggaggatcgcttgaggccaggagttcaagatcagtctgggcaacaaaatgagaccttgtctctacaaaaactacaaaaaattagctgaacattgtggcttgtgcccctagtcccagctactcaggtccctgagttaggaggattgcttgagcccaggagttggaggttacagtgatctatatttgccactgcactccagcctgggtgacagagagagaccctgtctcaaaaaataaagtctgtttttaaaattaattttaaacactggagtttattacaaaaagcagttggttctttttttaaatcatttttttttaggagaaccaccgctttttggctacattgtctagagtagcagtgttcaataaaaataagatccaagtcacatatgtaatgttaagttttcttttagtttctttttcttttcttttcttttctcttctttctttctttctttcttttttttttttttgatatgcagtctcactctgttgcccaggctggagtgcagtggcacgatctcggcccactgcaacctccgcctcccgggttcaagcaattctcctgcctcagcctcccgagtagctgggactacaggcatgtgccaccatacccagctaatttttgtatttttagtagagatggagctttgccatgttggccagtctggtctcaaactcctgacctcgggtgatccacatgctttggcctccctaagtgctgggattacaggcatgagccaccatgccctaccaatgttaagttttctagtagccatattaaaagaagtaaaaagaaatgggtgaagttaattttaataatatattttatttaacccaatatatctaaaatattatcatttcaacatgaacaagatactttacattcttttgtttttcactaagtcctcaaaatccagtgtgtattttatattgacagcatagttcagtttgaagcagccacatttcaagtgctcagtagccacatgtggctagtgactccatactggactgtgtaggtttagagtttcagtaaatttgtatgcaatagaatctacataaattggcatattatgcagatttctttgtatgcacatcagttcttgcatagcataagtcaggtcatgatgcttttagtctatgaggcagatttttttttttttttttttgagacagagtctcacttggtcacccaggctggagtgtagatgcacaatcttggctcactgcaacctccatgtgaggcagattttaacttggccctaatgcaaatattgtaagagagatctaatggcctttgatttcttacagagggcaatcaatacatgccatggttacaatgcttcagcatatagtatgcacgtcagccactgcttttactctggctagtgcttagtgtacctgtaccactgcccaggcagcatttgtcctgtggcaggtgaatcttagggtggaaggtggcaagtaacattgcttttttttgagagggagtcttgctgtattgcccaggctggagtgcagtggtgcgatctcggctcactacaacctccacctcccgggttcaagtgattctcctgcctcagcctcctgagtagctgggattacagacggccaccaccatgctcggctaatttttgtatttttagtagagacggggtttcactatgttggccaggctggtctcgaactcctgacctcgtgatccacccgcctcggcctcccaaagttctgggattacaggtgtgagccaccgtgcccagcctacatttttaaattaattaattataagcaggatctcactgtgttggccagactggtcttgaactgataagagttcaagaccagcctaggcaacatggtaaaaccctgtctactaaaaaatacaaaaaaaaaaattagctgggcatggtggtgcgtgcctataatcccagctacttgggaggctgaggcaggaaaatcgcttgaacccgggagactgaagttgcagtgaggtgagattgcaccactgcactccagcctaggcgattccatctcaaaaacaataacaacaaaataacattgttggaatatttagttaatttatagaagcgtattggcctaattggggcaaataccttattctgacattctctctatttgctttactgagctttttcaccagtggaatttaagcccttgatacatgaggagggaaaataccttggagctgtgctgcacatgtaaagtacacaggagatttagaaaacttcgtagcaaaaaaaagagtgtaaagtatctcattaatagtttttgtgggctggacacggtggctcaagcctatactcttggcacattgggaggctgagatgcatgagtctaggagtttgagaccagcctgggcaacacagtaggaccccgtctctacaaaaataatcagccagatgtggtgcgcatctgtagtcccagttacttgagaggctgaggtgggaggatcgtttgagctgggaagttgaggctacagtgagctgtgattgaaccactgcactccagcctgggtgacagagtgcctgtctccaaaaaataaataaataaataataatatgttttgtatgttcatatgttgcaataacattttggatatattaaatgaaataaaatacattaaaattaatttcacctgtttcttttcttttcttttttttttttttttttgagatggagtctcgctatgtcatcaggctggagtgcagtggcacgatctcggctcactgcaacctcctcctcctgggttcaagcgattcttctgcctcagcctccctagtagctgggattaaaggcatgtgccaccacacccagctaatttttgtatttttagtagagacggggtttcaccatattggccaggatggtctcgatctcctgacctcatgatccgcctgccttggcctcccaaagttctgggattacaggcgtgagccactgcacccagcctcttttaactttttaagtatggctaccagaaaatttaaaatgcatgtgtggcctgtattctatttctgttggatgctgctgccttagattattaattattcaatgtaaagactgctgggaggtactacctgcacttccctgaatatatgcttgagagctccaccagccgtcttcacagtagcaagaggggtattctgagtctgtcccccaaagagggagggagaagtgcagccctctcaggttctgtcagaaaacctgatcccaggccaggcgtggtagcttacgcctgtaatcccagcactttgggaggttgaggcaggaggattgcttaagcccaggagttcgagaccagcctgggcaacacagtgaagaccctatctctacaaaaatttttttaaaaaaattagccaggtgcagcaatgctgcctgtactcccagctgcttgggaggctgaggtaggaggattgcctgagcccaggagttagaggttgcaggagttagaggttccacgatcgcacctttcattccgttacatttgctgccttgagaacagaagacctgctggttttgttgccagtttgctcagtcatttttatgaaaaagccagtgctaactaggtgcttcttcgtgccttctctgagaatcaagaactctagtatgtttgcgtgtgttcagtctctcattaaatgttctcactatcccagagaaccatctcattggaccttggtctgtacataccttcatctttggctctgacttgtaattatttttagaacttctctttttttttttttggagacagagttttgctctagttgccagactggaatgcagtggcacgatctcagctcacctcaacctctgccttccaggttcaagcaattctcctgcctcaacctcttgagtagctgtaattacaggcatgtgccaccacgcctggctaattttgtgtttttagtagagacagggtttctccaagttggtcaggctggtctcaaactcccgacctcaggtgatctgcccgccttggcctcccaaagtgctgggattacaggcgtaagccactgcgcctggcctaattttagaacttgttaaaacaacttggcctctattgatatttccatgacccatgctattcagaaagaggattacaggtaattagctggctgggtttctcataccagagcatttcactgggatgttcctgaacctgggacaacttttatgcctggcatttttctttccttctctgttgtcccagactaagcaatttttaaaatagttattatttgttgagtaggagaatctcaggcagatcttcctggatcctcatttatacttttaaacctgtagtcttggaattagtgctctgtcccccaaccccaaacatccaatttctacattttggctacagtacaggtttactgtgtataactaaaagggctgtggaggagaaagaaaggaaccgacatttgttgggcatctgttatgtgccatgcactgagctggatgctgtaggaatatctcaatacctctgaggagtgggaattattatctctattttatagacaagggaatagaaatctgggagttaagtaattttttaatttcacacacttctggtagataatggattctagaacctggcataatagccacttgtcatcccagtgtaaaagagatgtgtggccagatggggtggctcacatatgtaatcccagcactttgggaagccgaggcaggaggatgacttgagcccaggagttcaagaccagcctgggcatgttttgtttgtctcacgaaacattttttaaaaaatgagtgtggcatggtgttgtgtgcctatagtcccagctcctcgggaggctgaggtgggaggatctcttgagcccatgatcatgccattgcactctagcctgggccacagagcaagactctgtcttcaaaaaataataaaaaggagctgtgattatcccaaggtggggattgtgaatgtgtttgtattgttctaaactgggagaaacaggctgggtgtgttggcttatgcctgtaatctcagcactttgggaggccaaggtgggaggatcacttgagtccaggagttcaaggccaccctgggcaacaggcaaaaaatagagaccccatctctattttttaaaaataaaataaactgggagaaagaagcagggtcctccccagagcatctttatccctagtcacagacctgacacctgtgttgggcaatggctacttctagattgtttacccctactgggacttgtggtgaacatatgcacactttggtttacagttgggacccctgattttagcaggatggcccaatggaatcagctacagcagcttgacacacggtacctggagcagctccatcagctctacagtgacagcttcccaatggagctgcggcagtttctggccccttggattgagagtcaagattggtaagtccttcttaagtgactctccaaattgttaggtttcagtttgagtcaagagacatgaactcttaatgtcatgccttgctgttccattaaaaaatgtatgggtacaggtgatggggaaaatgagatcaggagataaaggggcaccctttggtcttgtaaagccttttttatcttagaagggcatgtgggcaactgtctttgacacattgaaaccgcctgtatggtggtggatgtcttgaaggttgatttggacctcatttacttgggcagatcctctatatattctgataatccagtgatgtggtagacatattttttctctgaatgtgaattctgtcatagctagaactttgggttgatacttgtaattcccctttagttaaaggaaggagccacaggggtgtattagtctgttctcaatttgctataaagaaatacctgagactgggtaatttataagaaaagaggtttaatcggctcatagttctgcaggctatataggaagcatagcagcatctgctgctggggaggcctcagcaagcttccaatcatggcggaaggcagagagggagcaggcaggtcacatggccacagcaagagcaagagagcaagggggaggtgccacacacttttaaactatcagatctcacaagaactcactgtctcgaggacagtatcaacagggatggtattaaaccattcatgagaaacccacccccatgatccagtcaccttccaccaggccccacctcaaacagtgggggttacatttcagtatgagatttgggcagggatgtagatccaaactagatcacaggataagggaagtagattccattcatagagcagataatggcacagatgtccagcaactattttcttcactttaatatgctcaggctcactactgattttggtttaattcaggccagtgttaatatgacctggtttttccagaatgcatactctgatttggtgaagggccaggaggtgattcacagatgttggagataggccatcccagcctgggattacttatttgtactaataaatctgaccagagttaattgagggtttaaagcaaaacagcatatctgtctactttgctcaaatattttacaaatacaacagattatgagagtgggtaataatatctggaataattgtttttttgttttgtggtttttttttttttttttttgagatggagtctggctgtagcccaggctggagtgcagtggtacagtctcggctcactgcacctctgcctcttggattcaagcgattctcccgcctcagcctcccgagtagctgggattacaggtgcccaccaccacacctggctaattttttatttttagtagagacagcgtttcaccatgttggccaggttggtctggaactcctgacctcaggtgatccgcctgcctcagcctcccaaagtgctgggattacaggcatgagccaccatgcctggcctggaataattgttaataattattacattgatggcattttattgctgagcaagaagaatctaacatgatgaatgggttatagcatcaggtttgctttgtttttttgtttttttcctctttcttgatggtgatttctgtgtttgtgtgtatgcgtcggcttcagagccattctttatcattcttccttttcctagggcatatgcggccagcaaagaatcacatgccactttggtgtttcataatctcctgggagagattgaccagcagtatagccgcttcctgcaagagtcgaatgttctctatcagcacaatctacgaagaatcaagcagtttcttcaggtatgatgagaaactgaggacaaggagaaacaggacccgcagagtcgggtgttagtgttctttcctggaagcatctcttttctcatttggctaagtaacgagaatctatcttgtattttcaatcacaggagaagtaattagccctttctcaaagctctgtatacttacccgtgagcatcattacctgagaatcacttctcttgtcacagttgaagtaataaagtgattgttatgttaatcatacatgttagcatgttaacgcggtccactgataggaagatgactctcactgttacatgttaaatgtttgaccataatgggatacttcttgactaagtcagtagcttccctgcaagaccaggatagtatactgtgtaaagactcagacaaggccaggcatggtggctcacgcctgtaatcccaacaccttaggaggttgaggtgggaggattgcttgagcctgggagttttgagaccagcttgggcaacataacaagacaccatctctacagaaattttttttaaaaactagctgattgtggtggcatgcacctgtagtcccagctactcagaaggctgaggtgagaaaattgtttgagcctgggaggtcgaagctgcaataagccgtgattgcgccactgcactccagcctggcggacagagtgagagccagtctcaaaaaaaaaaaaaaaagactcaggctaatgtgccttctgttacagaaatagtaacgacctccccttcgccccccgccgacagagagccttcacccaggctctgaagcctttgttccgttgtttcctagaataaatgctttccttgatgaatacattagttttaaggtgccacagttcagtccacatctccatggtctgctgctgatttttattctctttctctcctacttatagagcaggtatcttgagaagccaatggagattgcccggattgtggcccggtgcctgtgggaagaatcacgccttctacagactgcagccactgcggcccaggtgagacctgagacaaaacaaatccctggtctgggaggaatggaaaatcaaacaactttataatgagataaattattagatctactaaaaaagaaggaaaagaaattaaatagatcaataatcataaaaatacattgaaaaactctaaaaaaaaagaaagttccaccccccaaaatacattgaaaaactctaaaaaaaagaaagttccaccaaaagaatccaacagacccaatggtttaaaagttttgttttgttctgacaaattttctttgtttttctttttttttttttctgagacagagttttgctcttgttacccaggctagagtgcaatggcgcgatcttggctcactgcaacctccacctccagggttcaagtgattctcctgcctcagcctcaagagtagctgggattataggcgtgtgccaccacacccagctaattttgtatttttagtagagacggggtttcttcatgttggtcaggctggtctcgaactcctgacctcaggtgatccgcccgcctcagcctcccacagtgctgggattacaggcgtgagccactgtgcccggcctgttctgacaaactttcatagtacagattattccaatatcattcaaacttttccaaagtataggaaaacaagggatgttttcagcttattttatgaggctggaaaaatcctcatatcaaaacctaaaaaacagccaggtgtagtagctcacgcctgtaatcccagcactttgggaggctgagacgggcagattgcctgagcctcaggagttcgagaccagctggggcaatgtagcgagacctcatctctctttttttttttttttgagacagagtctctctctgtcgtccaggctggagtgcagtggtgccatcttagctcactgcaacctccgcctcccaggttcaagcgattctcttgcctcagcctcccgactagctgggactacaggtgtgtgccaccaagcctggctaattttttgtattttttttagtagagatggggtttcaccttgttaggcaggatggtcttgatctcctgacttcatgatccaccggccacagcctcccaaagtgctgggattataggcatgagccaccacgcccagccttttttttttttttgagacagagtcttgctctgttgccaggctggagtgcagtggcgtgatctcagctcactgcaacttctgcctcccaggttcaagctattcccctgcctcagcctcccaagtagctgggactacaggcgcgcgccaccacacccagctaattttttgtgtttttagtagagatggggtttcactgtgttagccaggatggtctcgatctcttgacctcgtgatccgcccgcctcggcctcccaaagtgctgggattacaggcgtgagcaaccgcacctggcttaattaaggatctttctaaacacaagaaagaatatttatcagaaaccaaagggagcatgatgcacagtggtgaaacactattctcagtaaaaacagcaaaagataaggatgtcttttaccattgatacttttctgagggatccagcctatgcaaaaagaaaaagaaatgagggtacaaatattggaaagcaagggacagaactcttattatttacagatagataggtcttcctcgaagatccaagagaaacaaaactaacaataacaattggaactagcaaggtttagaaaggccattgtatacaagataaatatttttagaatctgcagttcccctaatcagtagcagcagtaacctgttagaagatgtaatgaaagtaaagatctgggccaggcacgatgtctcacgcctgtaatccaagcactttgggaggccaaggtgggcagatcatgaggtcaagagattgagaccatcctggccaacatgatgaaaccccatctctactaaaaatacaaaaattagctgggtgtggtggtacgcgcctgtagtcccagctactcgggaagctggggcaggagaatcgcttgaacctgggaggcggaggttgtagtgaaccaagattgcgccactgcactcctgggcgacagagcgagactccgactgaaaaaaaaaaaaaaaaaaaaagaaagatctgattcatagtagtaaaactaaatgtatgcaatttgcatatactattggtatgtatgggaaaatatctggaaacacatatactaaatcattaaagtagtcggtcataggagacttttttactttctgtgaggggttttaccgtctttaatatcctataatcagggacattttttctttttctccgtgaccccctgctttttaaaaaattgtggtgaaatacacataacattacatttcaaatttacctttgtaacctttgttttttttttttttttttgagacagtctcactctgtcacccaggctggagtgcagtggtgtgatcacagctcactgcagcctcaaccacctgggccctagcgatcctcctgcctcagccttatgagtagctgggactacaggcacatgccaccatgcccagctaattttttttttttttttttttggtagagatgggctcttgccatgtttcccaggctggtgttgaactcctgggctcatcaactgatgagaaagagctctccaggcagaaagaagatcatgttcaaagacagaaacagaaatgtgtattcttgggagaagtgtagaaagttcagcatctgattgggtcggggaagacaagctagtcaaggccacatgatgttttaattagtcatgcctaacagtggggccctggaagagcagtttaccacaaggggccaactgcttcggtttgaacccgcagccctgccacttgctctgtaaccttaagtaaacaatttttactctctctgttcctccaatgggagtgataacaataccttcttcatagaattaattcatacatgtaaaatgcttagaacagtatctgacacataaatgcaaaataatttaactgctttctgctgctgctgacatcactatcatcaccctcaccattactgtaggaaatggggacccagtgaagaattttttttttttcttttgagacagagtctcactctgtcacccaggccggagtgcagtgacgcgatttcggcccactgcaacctctgcctctcaggttcaagcgattctcatgtctcagcttcccaagtagctgggattacaggcatgagccaccacactgggctaattttttgtatttttagtgagatagggtttcaccatattggccaggctggtctcaaactcctgacctcaggtgatccatccacctcggcctcccaaagtgctgggattacaggcataagccactgtgtccggccctagtgaggaattttaagcagaaaactgatatgctcaggtgtgagcgaggtggtaggtaacacttactgtgcagtgccctgtagcccaagaggttagcacacaggcatttgctcaggcagcactaggattttctgctgtggaaaacctttgtattttatcctgctccacaagataaaaataagtggtttaagtcaatttggatagaggctccaacttaccatgggaggtaggaaagccaaagttatcccaaggatgttttcaatcgtacggattaggggtctgcaaactgtgagcgtggcccaaatccagcctgctgcttgtttttgtaaatgaggttttttcggaacccagccacactcatttatttatgcattatctgtggctgctttggtgctgcagtggcagggctatttgtggcagggactgtatgacccaggaaaccaaaaatatttaccctctgtcccttagagaaaaagtttgcaacccctgatataaagctataagttggttatttgtggcctcaacccaggcctcactgctattttttctgtttacaatacctggcatgctcttaagtgtctagaattggttaaagatagaagagtggatgtaatccctgctaccaagggctgtcaggctagttgggattataagtacacaaacactcaaagtgagaaaaacacagaaaaggatgtgtgtcattttgtctaaggaagttgaataagatttctcaggaaaagaaacatttgaactgaatttgaaggtgagtgagttcaggtgtgtttgggctgaagcccaggccatgctgagtggatagcgggtgggaagagagtgtggaaacacactgcatgcagggaagagttgggagtctggggtgaccaaggcacagggagggaaagttgaagttatcaattgtgtgaaacagctttctgtgttggcctgagatgtttatagctggaagcagtggggagccaatacagttttttacgaaggtattagaggtgggtttctgtgggtgatcgttaatcatgttttctccctttaagtgtagtcctgcttgagaaatagacatgagaaaggaatgaaggttaaaacatcagctgtattgttggtaaaactagaatggaaagtgtggcttgagctggtaaccataggggctttccaatgcctgtgccctgagttagatcttggggtagagagactggatgtgcagagcagcacccccaccccaccccagccatccatatggagcttcagctgccatagaccaacaaggcagagggataggcctctagacctgcttctagaaaccaggctgctgctcttgcttatggtgggccctaggaaggcaagagtgagaggagggaggcaccagcttaggtgctgggttctttgaagatctgtgtgtacacagagtctttctctccatcttaccaatcagatgagtcactgtcactgtgggaagaagtaggggcatgggtcaccttcccaaaacttctaagaagtttgtattctgtgggcttggatagggaccatgggaaaggaagagaatggttgcccataaaactggctgtagtgtggcctcaaacttctggacttaaatgatcctcccacctcagcctcccaagtagctagaactacaggtatatgccaccatgcccagctagttaaaaaaaaatttttttttttttttggttgagatgaggtctctttctatgttccctgggccggtctcaaactcccagcctcaagtgatcctcctgccttggtttcccaaagtgctaggattataggtgggagctaccatgcctagcccaagcctgtaattttttttttttttttttgagatggagtttcacttttgttgctcaggctggagtgcatggcgcagtcttggctcaccacaacctccacctcccgggttcaggcgattctccttcctcagcctcccgagtagctgggattacaggcatgcaccaccaagctcagctaactttgtatttttagtagagatgggtttctccgtgtcggtcaggctggtctcaaactcctgacctcaggtaatctgcccaccttggcctcccaaagtgctgggattacaggcatcagccaccgcacctggcacgaacctgtaatttttaagtttcatatgctatttattttttgttatttctttaattcattcattcatttattcattcgagatggggcctcactatgttgactaggctagttttgaactcctggcctcaagcagtcctcccacttcagccttcccaagtgctgatattataggtgtgagctgctacatccagccttctttcttctttttctttttccatgtgctatttgacattttccaaggtaccagcctccccttctccccaagataatatcttttaatatggaatttcatccctagggcaggactttttttttattatccctcagaaatatactggacaccacgtttaagtagacatccaacatctgctgtcataaattgttttgaattttttgacatacttgcccatgaggtttttgaaggcatagaccatgtcttagctgaacatgtggtctcttagtgccataaagggggtttatggtatgacctgtgtagtgtcacctgtgtagtgacagcaccactgcctctgtttcccttcctcttgtgatggcagcagcgtctcaagccaaacaagaagggtagttagggtgggatggaagctgggtagaggtattcctctccccatagttctgtgttcacatgtgcattgacctcctttttggcagcaagggggccaggccaaccaccccacagcagccgtggtgacggagaagcagcagatgctggagcagcaccttcaggatgtccggaagagagtgcaggtgatgcaagttacaagcctcgggcagggagctttcattaatttttttttttttttttgagacagggtcttgctctgccactcaggctgggctgcagtggcatgatcacagctcactgcagcctcgacctctcaggcccaagcgatcctcctacctcatcctcccaagtagccgggaccacaggcatgcaccaccacgcccagctaattaaaaaaaaaaaatttgtagagatgggggtctccctgtgttgtccaggctgatcatgaactcctgggctcaagtgatcctcccaactcagcctctcaaagtgctggcattacaggcgtgagccactgcacctggccaacagggagccttctcttggggatactgcctgcaggtcctgcatgtatcttttttgaggttttggcttcatttgaattctcctcagaaactttatattttctgttcccaaggaaatctttctttacttctgtttttttgtttgcttattttaaacaggatctagaacagaaaatgaaagtggtagagaatctccaggatgactttgatttcaactataaaaccctcaagagtcaaggaggcaagtgaatattagagatgttaaaatctctagaaagtgagtttgtgttgttgagttgaaagactcatttgtcttaactctgtttagatcttaaggcgggcggggcgcaagggaggtacgggtcctcaaaggagcctggtcattaaggacaggagtattccctcaggtccaggagtattccctcaggtccaggagtattccctcaggtcaaggagtattccctcaggtcaaggagtattccctcaggtccaggagtattccctcaggtccaggagtattccctcaggtccaggagtattccctcaggtccaggagtattccctcaggtccaggagtattccctcaggtcaaggagtattccctcaggtccaggagtattccctcaggtccaggagtattccctcaggtccaggagtattccctcaggtccaggagtattccctcaggtccaggagtattccctcaggtcaaggagtattccctcaggtccaggagtattccctcaggtccaggagtattccctcaggtccaggagtattccctcaggtcaaggagtattccctcaggtccaggagtattccctcaggtccaggagtattccctcaggtccaggagtattccctcaggtccaggagtattccctcaggtccaggagtattccctcaggtccaggagtattccctcaggtccaggagtattccctcaggtccaggagtattccctcaggtcaaggagtattccctcaggtccaggagtattccctcaggtccaggagtattccctcaggtccaggagtattccctcaggtcaaggagtattccctcaggtcaaggagtattccctcaggtcaaggagttttttcttccttcgcagacatgcaagatctgaatggaaacaaccagtcagtgaccaggcagaagatgcagcagctggaacagatgctcactgcgctggaccagatgcggagagtaagggcataggtcggaccacttcccccatgtgtctcgctcacttgcgggatttcagcgtcttgtggcagaacttgcttggtttctaagaagttcctgctctggagttgactaaagaatgtggttagagacagtctgaggaaatgttttctgactttgttttggtttccaaccagagcatcgtgagtgagctggcggggcttttgtcagcgatggagtacgtgcagaaaactctcacggacgaggagctggctgactggaagaggcggcaacagattgcctgcattggaggcccgcccaacatctgcctagatcggctagaaaactggtaaaggatgaaagaagcttttcctttctttctcgaaagctagattgaattctgatcttaactgcaggcccacagaattggtactatatctccaacgtggggacttttccatattcaaatttagcccaagaattaaagtttttactttatttcggccaggcgctgtggctcacacctgtaatcccagcactttgggagaccaagatgggcggatcacttgaggtcaggagtttgagaccagcctggccaacatggtgaaaacacatctctactaaaaacataaaaaaattagccgggcgtggtggtgcgcacctgtagtcccagctactctgggcggctgaggcaggagaatcacttgaacctgggatatggaagttgcagtgagcggagatcttactaccgcacaccaaccagcctgggagacagagtgagactccatctcaaaaaaataaaaataaaataaagtttttactttatttggagaaactttgttttaaaaaatgtatttatattattatattttaagtatattttacttaataattcaattaaggcttttggtttaactgtatttaacagatagacaaaccttttaattttagttattttagtaatctaaaatgacacatgccctttttaagggaaaaaattcaaatacagaaaattaatcaagagaagaaaaaatttttaaatgaaatcatcagcagtactagtagttaaaatttagttgatgctcaatctagacatctgtcattatgtatatacacattatgtatatacacataaagatagaaatttatacagtttatattaggatcatttttttttctttttttggagtcagggtctcactgtgttacccagtctagagtacagttatgcagtcatggctcactggagccttgacctcctgggctcaggcagtcttcccaccttagccttctcagtagctgggactacaggcatgcaccaccacacctggctaatttttaaattttttatagagacagggtcttactttgttgcctgggctggtctcaaattcctgggctcaagggatcatcccacttcggcctctcaaaagctctggaattatagatgtgagctgccgtgcccagcccaggatcttcctttatatgcttttctgtaatttgcacttttaccttcatccagcatatcttactgcaacccttcctgtgcaaggccctatagtgagcatgttgcaccagcttgccttaggagaaacttgagatacagagcctgcactggaaatttagcgcaactctacatgagaatgcctgtctattcatatcctcactaaccctgagtgttgttaatttactgaaagcagttttaaatgcttcctgaccagggaacgaagaagcttaagttctgggaatgggaggatagaagtgccagaaaagagctcaggagttcagaaatccctgcagcggtccccctccctctcctttcactttctgtctttctggtcttttggtctttgttacactagtgataaaccatcaaagaatgatggaatgatgctaacttctctctttttttaatttttttgagacagagtctcactctgtcacccaggttagagtgcagtggcatgatcttggcttactgcaacctcctcctcccaggttcaagcgattcttagtcacaaccttccaagtagctgggattacaggcccatgccaccatgcctggctatttttttgtattttagtagatcgacctgcctcggcctctcaaatttttgggattacaggtgtcagccactgcacctggcctaatatctctattcttggagatagatttaatgagctttttctccctctctattcacttattccttgtgcatgttatcaatattttgaaacataatgtcatgtcctttgatcagttgaaggctgacattgaaaaggcttatggggattgggtgttgtggctcacgcctgtaaatcccaatgctttgggaggcagagtcgggaggatcacttgaacccaggagtttgagaccagcctgggcaacaaagtgagatcccatccctacaaaaatttaaaaaactagacatgtgccattacacttcagcctgggtgacagagtgagactccatctcaaaaaactaaactaaactaaacaggcatggtggcacacacctatagttctagctactcaggaagctgaggtaggaggatcactcatgtccaggagttggaggaggcagtgagctatgatcatgccattgcactgcactaggccacagagtgggaccctgtctcaaaaaaaaaaaaagaaagaaagaaaagaaagggctcatgtagttcaagcccttctcttcatgcaaggggatgctaaggcccatgatggtgaagggcctggcaaagcttgcacagatagtgtgtgacagagctggctcaaacccatctttgggagctgtctaatctctttttctgagtctttatgttcatagacaagttaggatgagtaaagtaagtgctaaattccatatttcgtgttctgcatatctgggctcagatgcttgtcattttccagtgataactccatcaatgcctcctagtggtataaattttaatacttcttgtgtgcccagccccctcttagaaatttgagattttaggaagggactagtaataaaaggtaaaataaattattttctggccaggcatggtggctcacacctgtaatgccagtacttcgggaggtcgaggcagatggatcacctgaggtcaggagttcaagaccagcctggccaacaaggcaaaatcccatctctactaaaaatgcaaaaattatccgggagtggtggtgggtgcctgtaatcccagctacttgggaggctgaggcaggagaatcacttgaacttgggaggcggaggttgcagtgagctgagactgtgccactgcactccagcctgggcaacagagtaagactctatctcaaaaaaaaaaaaaaaaaaaaaaaggccaggcgcagtggcttacacctgtaatctctcaggaggctcaggcaggagaatcacttgaacccgggaaatggaggttgcagtgagccgagattgcaccactgcactccagctcaaaaaataaataaataaataaattattttctttttttatttattttttcagcatccacccaacatggtgaaaaattcctcttttcttaatgtcactgaactgtaaacttaagatgaaaaattgtaaatttcatgctatatatatttcaccacaataaaaaaattccttgttcttattgtagtggtctccatgtcttcagtatttccttccccttctccatctcacctgtatacattcactttggtaattagcatctttcttaatttattggcaggataacgtcattagcagaatctcaacttcagacccgtcaacaaattaagaaactggaggagttgcagcaaaaagtttcctacaaaggggaccccattgtacagcaccggccgatgctggaggagagaatcgtggagctgtttagaaacttaatgaaaaggtaatttagcatccttgtccctttccctcatctaaaaaatacctaaagactcacgtggtagagtgagaggcgggctgacttctggtcatggccgtggcgcgtgagcccatcttctctttcctcagtgcctttgtggtggagcggcagccctgcatgcccatgcatcctgaccggcccctcgtcatcaagaccggcgtccagttcactactaaagtcaggtaggccatgccacttccatttccagtagagattttactgagggacactgttagggtgagggtagagttggtggccagggtcattctttccaggtgtggtgtcacaggcagtacactgttgcggggttgaaatttgttgccatactatctgcttgctctctgattctgatgtcaaaagcaaaagagcagtcatctttttgaaggtacctgggcatattcctatgattgtagacctggagtctcaggccacagcttctccttctgcccaagggacaaaataatgtcatctattttctgttctttgaggctactcttccctgtggattttaagggaaagagtaaggcttagtgatggggaagctgagaggccccagggcaggtgggtggtgggcctgtagggtgaggtgttactttcacactcaagtcagaacaggtgtgctggggttttgaccttctgcagcaaaatttccctcctcagaaacttagtatggtgttcggtttcaggattaatagaacaaaatgccagctgcacagcatgtgttcctgtaatatttttcattatatggctttgattatccttttgtgaatctctcacaactttaagttgttagttcttagatgttttctcagtacctttggcttgaaggagtgatactcatcttttgtttttgtttgagacagggtctcactctcacccaggctggtgtgcagtggcatgatctcagctcactgcaacctccatctcccaggttcaagtgattcttgtgcctcagcctcctgagtaactgggaatagaggtgcgtgccaccacacccggctaatttttttttttttgagacagagtctcgctctttcggccaggccagagtgcgtgttgcaatctcaactcactgcaacctccacctcccaggttcaagcgattctcctgccttagcctccctgagtagctggaccggcacactccaccatgcccggctaatttttgtatttttagtagagacagggtttctccatgttggccaggctggtctcaaaactcctgacctcagtaatccacccaccccggcctccaaaagtgctgggattacagatgtgagccaccacgctcggcctttttttttttttttttttttttgagatggagtctttctctatcacccaggctagagtgctgaggtgtgatctcggatcactgcagcctctgcctcctgggttcaagtgattctcctgcctcagcctcccaagtagctgggattacaggtacctgccaccatgcccggctgatttttgtatttttagtagagacggggtttcaccatcttggccaggctggtctcgaactcctgaccttgtgatccacctgccttggcctcccaaagtgctgggattacaggtgtgagtcaccgcacccagccctattttaatttttttaaagagagagataggggccaggcacggtggctctcgcctgtaatcccagcactttgggaggccaaggtgggtggatcacctgaggtcgggagttcgagaccatcctgaccaacatggagaaactctgtctctactaaaaatacaaaattagctgagcgtggtggcgcgcgcctgtaatcccagctacttgagaggctgaggcaggagaatcacttgaacccaggaggcggaggttgcggtgaacggagattgcgccattgcactccagcctgggtaacgagagaaactgtctcaaaaaaaaaaaaagagaaagagagataggatctcgctctgtcatctaggctagagtgcagtggcatgatcatagatcactgtagccttgaactcctgggcacaagtgatcctcttgcctcagcctcccgagtaactgcgactacaggtacatgctaccacaccccgctaatttttaaattttttatagatgtgggctctcactttgttgcccagactgttatggaactcctgggctcaagggatcctcccagcttggcctcccacagtgctgagattatagatgtgagcctgtaattatagacagcttggcctatttacctgttggaaatgaagaattatgaattttacatttcttcaagaaaaggttatgggagagttactgactttttttccttggattttttctttttaaataggttgctggtcaaattccctgagttgaattatcagcttaaaattaaagtgtgcattgacaagtaagtactcctatcttagctctgtttttcaaatgaggaatagaaaaatgagaactttgacagacatcatttgaactagagactctgtctttattcagagatcttcattttgtggacaaaagttttcaaaagccttggggtgcattgtcatttacgtgtctgaacaaagccacaaagctgggggtacagatttgatttgtggttgctattgtgacaaccagtccctcttttccttgtttagttttttacttgtacatgtcattcatgcatattatatataagactgagatcatgtgttaattaacgactgggatacgttctgcaaaatgtatcattaggcaattttgttgtgcaaatgttgtagagtatatagtccttacacaaacctgggtggcagaacctactgcacacctacgctatgtggcagagcctactggtcgtaggctgtaaacctgtacagtatgttactgtgctgaataccgtaggcaattgtaacacatctcaatgaagtaggaatttttcagctccatgataatcttatgggaccaccatcatatatgcattttgttgttgaccgaaacgtcgttatatattctttccatacatagcatgtggaaagaatagatctcttttttttaattgttccacactttaccatataatggaatacgcaaaatttcacaatacctttcaggatgtaaaatacatataccctttgacgacattagaaaagagaaaatgtgggccgggcgcggtggctcatgcctgtaatcccagcactttgggaggccgaggcgggcggatcacgaggtcaggagatcgagaccatcctgggtaacacggtgaaaccccgtctctactaaaaatacaaaaaaactagctgggcgtggtggcgggcacctgtagtcccagctactcaggaggctgaggcaggagaatggcatgaacctgggaggtggagtttgcagtgagccaagatcacaccactgcactccagcctgggcgacagagactccatctcaaaaaaaaaaaaaaagaaaagaaaagagaaaatgtggctgggcgcggtggctcacgcctgtaatctcagcactttgggaggctgaggtgggcagatcacctgaggtcgagagttcgaaaccagcccgaccaacatggagaaaccttgtctctactaaaaatacaaaattagccaggtgtgttggcgcatgcccgtaatcccagctacacgggaggctgaggcaggagaatcacttgaactcaggaggtggaggttgtggtgagccgagatcacaccattgcactccagcctgggcaacaagagcgaaactatctcaaaaaaaaaaaaagaaaaaagaaaagataaaatgcattcttatttttagttgatgtaattatgtggaaatttcatgaggatgcactggaaaataatgaaataagggagttgacgaaggtggtaggtttaataagtacatatgcaatatgaaacataggttccccttcctatggggaggcaaccaactgtgcctgctacgcagaggtgttatgttgcgctgatcaactgtaactgaatagtttaaagaaatgcccaggagcacagaggttttttcatgacagtaaataacaggtggtcaaagtaggctttttgaagaaacacagagcctattttattaacaacagtctgtgttcttacagagactctggggacgttgcagctctcagagggtaagttcagcctagaggcttccttttgttccgtttaacctaacttcatcctccggctacttggtcacctacatagttgattgttcccctgtgattcagatcccggaaatttaacattctgggcacaaacacaaaagtgatgaacatggaagaatccaacaacggcagcctctctgcagaattcaaacacttggtatgtgggaggagctccccttcacaaagggcctctggctgccggagagggctagggagagcctcacaggacacctgcctttttcttttcttacagaccctgagggagcagagatgtgggaatgggggccgagccaattgtgatgtaagttttgttggggatgaaagacaactggggtgttttccttgagggagagaggggtaaagatccttcttaatccccagaattagaaacatcaacctgttctttcagctgtagttattccaaaaagtcacttcaggccaaagtgacatgaacagaagttccatgtgccatggagctctctggcttggaacatttccgtgaatatctgggagttggctcctccttaaggagaagtggaaagtcccttgctgagttgttctccacacccatgtggtataaagcagctttccaccttgcctggggctttccaaattccccatccagctcctgcggctgaccctgcttggctccatttttagtgccctgtttttctctcccactgaggtgggatagagggtgtaaaagcaacagatttgagttaaactttaaaataaatgaccaccttgcattagcttgcttaggaaaagagtacataaaataaaatgaacaaacaaaaacccatcttgttctttatcccccttattttctgcttttcattgattcagattattggattcttattgtcaagaataaactttaaacaaacaaacaaaaaaaggtaaatgtgacggaaggctagttttcagtcatttttaaaaattgtgatgccccgttctttttcttacatttgtcccctgaacaattcttcctctttaaaatgtagcagtcctagctgggcgtgctggctcacaccccgtactttgggatgccaaggcaggctggtcacttgaggtcaggagttcaagaccagcctggccaacatggtgaaagcccgtctctactaaagatacaaaaattagctgggtgtggtggtgcacgcctgtagtcccagttactggggaggctgaggcatgagaatcgcttgaacctgagaggtggagcttgcagtgagccaagattttgccactgcactctagcctgggcaacagagtgaaactctgtctcaaaaaaataaataaaataaaatgtagcagtcctttttaaaaatgtggaattttacttgacagtagagtgaagtagcctgtatgcaatgatatgggaaaatgtacatgacatattaagaaaaagcaaaatgtaaaataatttgaatagtattattagtatatgtgttttaaaaatacactatactcttatgtgtattcatatgtatattaagaaattctggaggaatataccagcagtgctatgtgtattagtgctgctgttggtatccatggctattctagactgtctctgtgatatttgcattttaaactgaatatattacttttataatcagaaaaatagtattaaaaatgaattataatttaatttcttttttcttttttttttttgagtcggagtctcgttctatcggattgcagtggtgcgatctcagctcactgcaacctctgcctcctaggttcaagcgattctcctgtctcagcctcccaagtagctgggacgataggtgcatgccaccacgcctggctaatttttgcatttttagtagagacagggtttcaccatattggtcaggctggtcttgaactcctgacctcgtgatccacccatctcggcctccgaaagtgctgggattacaggcatgagccgctgtgcccagactagaattcaatttttgagaattcattgacaactcttacttaaaataaggttgctgtactgatgtgagacattgttgtagtcagtttggaaaacaatttggcagtataaaaatgaacatacctgtaaaccaacggtgccattcccaggatttaatagcagagaaatctttgcatatatgtcccaggagacatatataaagtggacatcagcctgattataagctctaaatgcaacccaaataaatacccatcaacattagaatgaatacattatttgtggtatagacacaatggaatactccgcagctgtgaaaaggaatacactgcagatacacataaccatgtggattcatttcacatcaagtgaaaagtgaatcccaaaagaattcattggagtccataagtgtaaggttcacaaatgtcccaaactaaacaatacctgcattgcttagataaacaaatatggtaaaactgtaaaaaaacaaaacaaaacaagacaaaaagggctaggaaatgataaacccaaaagacaaaatagcagttatttctgagggaggagggaaggggatggggttggggaagggcacccagagaattttaggagtgatggacttttccttaaattgaatggtgggttcatattgttttgttattctttgtgccttacgtattttacaaataaccaattggatctatgtaatattataatacaaactgagtaaaggattaggttgaggatcacagcattggaagttcttggtgttgaagagagtaagtgccgagcaagttgtgtccctggcagtttgtttgtgaccacctggtggcttacccttcttggtgtggtgaggcttggcatgtcactttccttggctgtggctgttagtactgaatgccattctctctgaggaaaagtgtccttctcttttttattgattgactgattgattgagacagagtctcactctgtcacccaggctggagtgcagtggcgtgatctcggctcactgcatcctctgcctcctgggttcaagcgattctcctgcctcagcctcctgagtagctgggactacaggcgcccactaccacacccagctaatttttgtattcttagtagaaacggggtttcaccaaattattggccaggctggtctcgaactcctgaccatgtgatccacctgcctcggcctcccaaaatgctgggattgtaggtgtgagccatcacgctcagcctttttttttatttaatttaatttttttttaagacagggtctcactctgtcaccccagctagagtgcagtggcacaatcatagctcgctgcagcctccatctcctaggctcaagccatcctcccacctcagcctctcgagtagctggggctataggtgtgcaccaccacacccagctaatttttgtattttttgcagagatggagttttgctgtgctgcttagactggtctcgaactcctgggctcaggcaatcctcctgccttggcctcccaaagtgctgggattacaggcatgagccaccacacctggcctaagagtgtccttctcgttactgtaggcttccctgattgtgactgaggagctgcacctgatcacctttgagaccgaggtgtatcaccaaggcctcaagattgacctagaggtaagttctgcagcagaatcggtgagaggctacgtacaggggtgactcaggacaaaaacttccactgggatttttacaagagaaggtggaatgattactgtttgcttaacactgtgtttatttttgcttacttttctccaaaaaaatccttggcatcccatctggcaataaagtcttgcttgaatgcttagaagatgtgtgtatattcagctttcagcaaacttgatatgaaaatctctatttagaaattgattggccgggcgcggtggctcacgcctgtaatcccagcactttgggaggctgaggcgggtggatcacgaggtcaggagttcgagaccagcctggccaacatgacgaaaccccgtctctactaaaatacaaaaattagctgggtatggtggcggacgcctataatcccagctactcgggaggctgaggcaggagaatcacttgaacctgggaggcagaggttgcagtgagctgagattgtgccattgcactccagcctgggtgacagagtgagactccgtctcaaaaaaaaaaaaaagaaattagaactgactttataaagtttgggcataagagtcttagcagccagtgtgtttagtatacagaaaattgtggcaatgacattctcctttcccaactttcttgatttttaaattaagatatacctagaaaagcaggaatcctggtctttgattcctgagacctccctgtttcatgtgaagatacagcttcaagtcttggagaatgcctccaaggtcttaaaaatggggaatctgtggattgtgagtcaagctttgagcaagtcaggttttacaagggaccggtatattccgactgcagcctgagttgtgtggccacgctgggcattctttccactatgagtgctcactgagctgactcactcacactcctcgcctagagttggcagcaggtgtggtttatggcatgtcctttcattctgagccccgtgagatgcgggtgaagagatttccaaggctgtgagagcccctctgcctccccagctcagtccccactccctccgcagacccactccttgccagttgtggtgatctccaacatctgtcagatgccaaatgcctgggcgtccatcctgtggtacaacatgctgaccaacaatcccaaggttagtgccccctccttttagttggtgccccgggatctcttgcgacttaggggtacctagtatagacaatgagcaccatccctcatctaaacaagcaaatgtgttctttccaatagaatgtaaacttttttaccaagcccccaattggaacctgggatcaagtggccgaggtcctgagctggcagttctcctccaccaccaagcgaggactgagcatcgagcagctgactacactggcagagaaactcttgggtccgcatttcaccccttctccctcccgcccacccgcccagaaaagggatccggcccatagggctgttcatttgggccatgtctactgagcattaggccatgtttctttcctgagcaaggcgctgtgctggtgccaggaaacaggggagttggggagttggggtgcagagacagtttgcagttttcagtcgaggtgatcatttttgaggtgggaggtagatttcttttctcctggttgctgtctcattcacccactctatctaactttagaagatcttttaagtgtgtgttggaaggtggcactaaaggcttgacattccctgtccatttttttaataaactataggctagttggttttttttgtcttattttatttatttatttatttttttgagacgagtcttgctctgttgcccaggctggagtgcagtagtgtgatctcggctcactgcaacctccgccttctgggttcaagcgattcttctgcctcggcctcccgagtagctgagactacaggtgctcaccaccacgcccagctaatttttgtatttttagtagagacggggttttaccatgttggccaggatagtctccgtctcttcacctcgtgatccgcccacctcggcctcctaaagtgctgggattacaggcttgagccactgtgcccagcgtaggctagtttttaaaaaagaattagtggaatattttatgtgccacctgggctagaagtagctttgttctaataaagctgttgccaccaaatacacctgtctgacacccgatgtcagcttgttagtgagtgctgctgttggttcccagcctaccacccgaggttgggaagagcagggggacttgttatatcaccctccatccctgctgggctacccagcaacacaagtgagtcaaatgatgggatagtgtttgtcctcatgtgcacacacacaacagtgcctaccttcaaagatgtgaaagctgattattttgtggcccattgtgggatgaatgtgtgtgtgttctgttttaagaaataacctcttgaccccaagctgaaaatgtactacttgactctttttctttccttcaggacctggtgtgaattattcagggtgtcagatcacatgggctaaattttgcaaagtaagcaatcttgttaaattctcgtgggaatgggaatgctcacctgcacggctgtcgttgagggctctggcttgaaggccctgaactcttggtccagcggccagtaggacctgcctgaaggtagacgggcctgaggatttgggtgatgcactgcacccctaggaagggaagggctgggatggcagtagacttggctttcccattactcttttctccaggaaaacatggctggcaagggcttctccttctgggtctggctggacaatatcattgaccttgtgaaaaagtacatcctggccctttggaacgaagggtaggttggacagagtgtgcacagatgtaaccaagtcccctgctctcagcaagccagtggcaggggatggatgccctgttagcaataacaacattgttcctcctccttggctccaggtacatcatgggctttatcagtaaggagcgggagcgggccatcttgagcactaagcctccaggcaccttcctgctaagattcagtgaaagcagcaaagaaggaggcgtcactttcacttgggtggagaaggacatcagcggtaagggaggctcccacccaccccacctgctggtggctgctgaggcctcatcactgcttctagttgcaagcacctactgccccctggtgggtggagatggccttgactccctgtttcactcagactcgcaaaacacatttgcgtgacttctaaatccttccagctgaaggattggtttgctttgttttgcttgctccagtgactatttgttgagaattttgcaatttaaattgtattcttcatctctttttctacttaaccctgttaatatatcttacgcaagtagttatattcaagtttattttctatgacccaactagtagcctcttcttaattagaagccagcctgaatatttccacagtgccaggccactgaacagggtgttcagggtctcaacactagggtggcttaagtcttttccccttcgaggaaagaaaaaatgggcagttttctctgagatgacctagctgtaggttccatgatctttccttcccatgtcctgtgacaggtaagacccagatccagtccgtggaaccatacacaaagcagcagctgaacaacatgtcatttgctgaaatcatcatgggctataagatcatggatgctaccaatatcctggtgtctccactggtctatctctatcctgacattcccaaggaggaggcattcggaaagtattgtcggccagagagccaggagcatcctgaagctgacccaggtagttgttgattttccatgttcctggcatttaatttttgggaaaagttggaaattttgggatccttggaggatagataggcaaatgcctgaataacctgggggataattatttctccttatgggaaagaattgtagtgagtgcttttgttggggtgaccgatgggatttgagaggagaatcagaatcacttagagtagtgtagttcctgctccacagagagtgcatgagtctaaagaggggatacagcctgggcaatatggtgaaacctcgtctctacaaaaaatccaaaaaaattacccggtgtggtggcacgcatttgtagtcgtagctacttgggaggctgaggtgggaggatcacctgagccaaggagttcaaggctgtagtgagcggtgatcatgccaccgcactccagcctggctgatagagtgagatactgtgtcaaaaaataaaaataaagaggggatcaatacacatacgtcccccaaaacatgcctgaaacacgagaagggaaagtgagggcagttaacaggatgccctgctggcacagtgcttcttagtagatgctagaaggtttgaggcccagatttcagcccagcatatggctttttgcctgtaactgaaccatgtcagtgtgccagatggtctgaagaaagggtttctggaggaaattattattagctgcatgggagtatggtttacactagagtagaagagctgggagcatcacgtttgaaggggaagacagtgactgggtggaggggcaagggattagtatttagagtgtgcaactattgaaaataaggtatattttaatgtgtaagaggacatgtacttatatgttatatataaattattttagctgggtgaagtggctcatgcctatagtcctagcactttgggaggcccaggcgggaggatcacttgagcctgggagtttgagaacagcctagacaacatagtgagaccctatctatacaaaaataattttttttaaattagccacgtgtggtggtttgtgcctgtagtcctagctactcgggaggctgaggtgggaggattgcttaagcccaggaggttgaggctgcagtgagccatgatcgcaccactgcactccagcctgggtgacagagcaagaccttgactcaccaaaaaaaaaaaaaaaaaaaagagagagaaattaaaaatactgtaatctcagctgggcatgggggttcacacctgcagtcctagcactttgggaggctgaagcaggaggatcacttgaggccaggaactcaagaccagcctggcaacatagcaagaccccactacacacacacacacacacacacacaaagaagagaaagaaaaaaacgaaacaaaactgtaatctctgcagctgtcctcagtgtggagggggtagccctgtctgttccccttcagcacttgctgttttgactctctgggttctttgtgcaggtcttgatggggagtctctggtttgccattctttgtttgatttaactttctgtaatcataaagccaatgatgggctttttttttttttttttttttagactaagtcttgctctatcacccaagctggagtgcagtggcaccatctcggctcactgcaacctccacctcccggttcaagcaattctcctgcctcagcctcccgagtagctgggattatgggcttgtgccaccatgcccagctgatttttgtattttttgtagagaaagggtttcgccatgttggccaggctggcctcgaactcctgacctcaggtgatctgcccacttcagcctcccaaagtgctgggattacaggcgtgagccactgtgcctggcctaatgatgggctctttaatgtgatcctttagggttggcgccttgccctagttgctgttgaaaaaactatttttgtccaaatagcacacacacagaaacctaccaacttccctcccactttttcctaggaattccttctgagggatttcttgagatggggcagaatggggcttggaagagggagttggagctaattgaccgttgcctttctcctttgttggggtcctgagtcttgttcctgctgtaagagttactcacttcctgtctgccacctatctccctttgcatgtgtgcttcagttgggagatctgtttatcagcccctgccacacggctctttgttccttctgcagaggacgttggggtcccacggctggtccttttgactcattttgctttcaaggtcccacctcccagtctgaggctgcatcctccattaccatcgcccttcctgtgggctgggaggccaggtcctttcctgcccagcgatgtcagcgtttcctcaggggccaggcactcatcaggagaaaggaactaattacttgagtaatttgccttgccttgctgagaggagtgtgccctgagggactccatgtgagtgtggtgacgggtgtgggggtgtccctgtgttattttaaaatgggtgccttcaggacgatgagcatgtgaccatttcctctctatttccatcacaagagtattatggtatgagggtctcaggttagattatcctcccaagactcttctctcttccttctctactggaagcccacatagcatttccttatggcttgagggagaggttcggagccacttacaaattagataaagtacatttacaatcttgtacaaagccacacaatgaagtcatttttctcagctttttttttttttttttttttttttttgagcctgagtctcgctctatcgtccagactggagtgcagtggcgcgatcttgcttcactgaaacctctgcctcccaggttcaagagattctcatacctcagcctcctgagtagctgggattacagacatgcaccactatgcctggctaatttttggatttttagtagagaccgggtttcaccctgttggccaggctggtctcgaacccctgacctcaagtgatcttcccgcctgggcctcccaaagtgctgggattataggtgtgagccacagtgcccagccttgtttttgtttttgttttgttttgacagtctgtcactctgtcacccaggctggagtgcagtggtgcgatctcacctcacttcagcctctgcctcccaggttcaagtgattctcctgtctcagcctcctgagtagctgggattacaggcgtgccaccacgcccagctatttttgtaatttcattaaagacagggtttccccatgttggtgaggctggtcttgaactcctggcctcaagtgatccacctgcttcagcctcccaaagtgcagggattacaggcatgagccactgtgcctggcctcagctatcttgaatgctggagaattaaatccttttctgtctagggtgtcagctccctaagggctgggccaaaacagttggatttataagacactagagtcttgcctcagtagctcctttgaattctgcactgaattgatcagtttcttggcccaaagtaaactcagatggcagcccaagagccactctgcagtgccttctttcacatggtcatcatgctctctgatccctcaggttctgtctaagcctcatgttttatgaccgtgctgttctcagcccacctcaccctgccccatgccttctcaatggtttgttcacctgaattccccagatttcatgccagtatccccaaggttccttgacctcttggtgtaagcattcagcatctaaaattcattttattcccgtcaacgcatttctaactgtagaacaagaattataaatgacaaagctcatagaaaattggcaccttgtcttccccctccctcttattttatacataaaagagaatatgggctgggcattgtggccaaggctgggcatgatagctcatacttgtaatccagcactttgggagggtgaggcagatggatcacctgaggtcaggagttcaagaccagcctggccaacatggtgaaacctcatctctactaaaattacaaaaaaaaaattagctaggcatggtggcagatgcctgtaatccagctactcaggaggctgatgaaggagaatcacttgaaccctggaggcagaggttgtagagagccaagatggcgctactgcactccaacctgggcgaaagagagcaagactccgtctcaaaaaaaaaaaagacaaaaattagccaggcatggtggtgccacctgtagtcccagctgcttgggagcctaaggcaggagaatcgttttgacctgggagtaggaggttgcggtaaccgagattgtgccactgcacttgagcctgggcaacagagtgagactctgtctcaaaacaataagaacaacagcaacaaaagagagagaccatgccttgctccaggtctcttagctattgaagatgtacctggacccaggtctccggtcttctagttgaagcaattgtactgccttacaaagtcacattctctttggtgctttttgattgacgtatttatccaactagaaagttactcatgccctcatccaaaaatgtggtagaggccagattagtgctggtaggaataagagatataacctttggctttggaaccacaagcattagcagtctccatgttctttaaagacttggtgatattggtatttaggctggacaccatgcaaagactacacaggctcggttcctgcatgcagagaagttatctaagagatatgaccaggccggaatagaatgctcagaccacgtggaggctgttaaacttttacataatctagggaaagaagggacacaaggtggcattagtctagggtcaggtgggaaaaggttatgctgaaaagtctctgcagctcaggacagctttgtgcaaagaactgaagttcacagctgctagtgcctgggagatcaaatagtataaatgagggcagacaaccctgaggggcagatggagctttccagacaatcttggcatgaggatgagtgagtttcaaatcagtcctgccgaggcagatggcttcctccagctctgcttactgaatgcgaagtcacagtcagtaagaaaactggttttcttcttcccaggcgctgccccatacctgaagaccaagtttatctgtgtgacaccgtaagtggcttcctttccccgttttgccttcatttctaatatcctcagttatccctgggaatgggacactgggtgagagttaatctgccaaaggttggaagcccctgggctatgtttagtactcaaagtgaccttgtgtgtttaaaaagcttgagcttttatttttctgttggagaccagagtttgatggcttgtgtgtgtgtgttttgttcttttttttttttccattgtgtcttgtcaaccccccgtttcccctcctgctgccccccatttcctacagaacgacctgcagcaataccattgacctgccgatgtccccccgcactttagattcattgatgcagtttggaaataatggtgaaggtgctgaaccctcagcaggagggcagtttggtgagtatttggttgacagactttgtccctataagggaagttggtcccctttgtgtgatgctctcacatgtacacaccgagagctggtcactcggaatggtaggagattctagagctttgctttccaaaagagatggtatgaatgccacatgtgtgagtataaatcttctagcagccacactggaaatagacgaacttaatttttacaatatattttatttaacccactaaatccaacatactctcaatttaacatttcagaaaaagttgaggctgggtgagtggctcatgcctgtaatcccagcactttgggaggccgaggtgggtggatcacttgaggtcaggagttcgagaccagtctgaccaaaatctctaaaatataaaaattagctgggcatggtggcgcatacctgtaatcccagctactcaagaagctgaggtgggaggatcgcttgagcctgggaggtggaggttgcagtgagcagagatcgtgccactgcactccagcctgggcgacagagtgagactccatctcaaataaacaaaactaaactaaaaagaaaaagttgagacctttttttattcttttttttcatactaagcctttaaaatccagtgggcttttgacagccacagcacagctcagtttggacaaaccaaatctcaaatgcttggtggccacgtgtgtctcggggctcctgaattaaacagtagatcaagggcagaagatctcaggacagccttagagcttctgtaaacatggagctctgggaatcagttaaggtgggaatgagaaaggacccttcccgaggcagggtcctccagggaggagggtaaatctggcttttctgaccatccctgggccttaaggggcaggagattggatagcagtggtagcctgggccctgtcctctgaagggctgggggcgtggcctgccagttgcagagggtggacaactgaactagttttccctgtctgtccctccagagtccctcacctttgacatggagttgacctcggagtgcgctacctcccccatgtgaggagctgagaacggaagctgcagaaagatacgactgaggcgcctacctgcattctgccacccctcacacagccaaaccccagatcatctgaaactactaactttgtggttccagattttttttaatctcctacttctgctatctttgagcaatctgggcacttttaaaaatagagaaatgagtgaatgtgggtgatctgcttttatctaaatgcaaataaggatgtgttctctgagacccatgatcaggggatgtggcggggggtggctagagggagaaaaaggaaatgtcttgtgttgttttgttcccctgccctcctttctcagcagctttttgttattgttgttgttgttcttagacaagtgcctcctggtgcctgcggcatccttctgcctgtttctgtaagcaaatgccacaggccacctatagctacatactcctggcattgcactttttaaccttgctgacatccaaatagaagataggactatctaagccctaggtttctttttaaattaagaaataataacaattaaagggcaaaaaacactgtatcagcatagcctttctgtatttaagaaacttaagcagccgggcatggtggctcacgcctgtaatcccagcactttgggaggccgaggcggatcataaggtcaggagatcaagaccatcctggctaacacggtgaaaccccgtctctactaaaagtacaaaaaattagctgggtgtggtggtgggcgcctgtagtcccagctactcgggaggctgaggcaggagaatcgcttgaacctgagaggcggaggttgcagtgagccaaaattgcaccactgcacactgcactccatcctgggcgacagtctgagactctgtctcaaaaaaaaaaaaaaaaaaaagaaacttcagttaacagcctccttggtgctttaagcattcagcttccttcaggctggtaatttatataatccctgaaacgggcttcaggtcaaacccttaagacatctgaagctgcaacctggcctttggtgttgaaataggaaggtttaaggagaatctaagcattttagacttttttttataaatagacttattttcctttgtaatgtattggccttttagtgagtaaggctgggcagagggtgcttacaaccttgactccctttctccctggacttgatctgctgtttcagaggctaggttgtttctgtgggtgccttatcagggctgggatacttctgattctggcttccttcctgccccaccctcccgaccccagtccccctgatcctgctagaggcatgtctccttgcgtgtctaaaggtccctcatcctgtttgttttaggaatcctggtctcaggacctcatggaagaagagggggagagagttacaggttggacatgatgcacactatggggccccagcgacgtgtctggttgagctcagggaatatggttcttagccagtttcttggtgatatccagtggcacttgtaatggcgtcttcattcagttcatgcagggcaaaggcttactgataaacttgagtctgccctcgtatgagggtgtatacctggcctccctctgaggctggtgactcctccctgctggggccccacaggtgaggcagaacagctagagggcctccccgcctgcccgccttggctggctagctcgcctctcctgtgcgtatgggaacacctagcacgtgctggatgggctgcctctgactcagaggcatggccggatttggcaactcaaaaccaccttgcctcagctgatcagagtttctgtggaattctgtttgttaaatcaaattagctggtctctgaattaagggggagacgaccttctctaagatgaacagggttcgccccagtcctcctgcctggagacagttgatgtgtcatgcagagctcttacttctccagcaacactcttcagtacataataagcttaactgataaacagaatatttagaaaggtgagacttgggcttaccattgggtttaaatcatagggacctagggcgagggttcagggcttctctggagcagatattgtcaagttcatggccttaggtagcatgtatctggtcttaactctgattgtagcaaaagttctgagaggagctgagccctgttgtggcccattaaagaacagggtcctcaggccctgcccgcttcctgtccactgccccctccccatccccagcccagccgagggaatcccgtgggttgcttacctacctataaggtggtttataagctgctgtcctggccactgcattcaaattccaatgtgtacttcatagtgtaaaaatttatattattgtgaggttttttgtcttttttttttttttttttttttggtatattgctgtatctactttaacttccagaaataaacgttatataggaaccgt

SEQ ID NO: 113 - DNA, 4899 bp, Homo sapiens
gtcgcagccgagggaacaagccccaaccggatcctggacaggcaccccggcttggcgctgtctctccccctcggctcggagaggcccttcggcctgagggagcctcgccgcccgtccccggcacacgcgcagccccggcctctcggcctctgccggagaaacaggatggcccaatggaatcagctacagcagcttgacacacggtacctggagcagctccatcagctctacagtgacagcttcccaatggagctgcggcagtttctggccccttggattgagagtcaagattgggcatatgcggccagcaaagaatcacatgccactttggtgtttcataatctcctgggagagattgaccagcagtatagccgcttcctgcaagagtcgaatgttctctatcagcacaatctacgaagaatcaagcagtttcttcagagcaggtatcttgagaagccaatggagattgcccggattgtggcccggtgcctgtgggaagaatcacgccttctacagactgcagccactgcggcccagcaagggggccaggccaaccaccccacagcagccgtggtgacggagaagcagcagatgctggagcagcaccttcaggatgtccggaagagagtgcaggatctagaacagaaaatgaaagtggtagagaatctccaggatgactttgatttcaactataaaaccctcaagagtcaaggagacatgcaagatctgaatggaaacaaccagtcagtgaccaggcagaagatgcagcagctggaacagatgctcactgcgctggaccagatgcggagaagcatcgtgagtgagctggcggggcttttgtcagcgatggagtacgtgcagaaaactctcacggacgaggagctggctgactggaagaggcggcaacagattgcctgcattggaggcccgcccaacatctgcctagatcggctagaaaactggataacgtcattagcagaatctcaacttcagacccgtcaacaaattaagaaactggaggagttgcagcaaaaagtttcctacaaaggggaccccattgtacagcaccggccgatgctggaggagagaatcgtggagctgtttagaaacttaatgaaaagtgcctttgtggtggagcggcagccctgcatgcccatgcatcctgaccggcccctcgtcatcaagaccggcgtccagttcactactaaagtcaggttgctggtcaaattccctgagttgaattatcagcttaaaattaaagtgtgcattgacaaagactctggggacgttgcagctctcagaggatcccggaaatttaacattctgggcacaaacacaaaagtgatgaacatggaagaatccaacaacggcagcctctctgcagaattcaaacacttgaccctgagggagcagagatgtgggaatgggggccgagccaattgtgatgcttccctgattgtgactgaggagctgcacctgatcacctttgagaccgaggtgtatcaccaaggcctcaagattgacctagagacccactccttgccagttgtggtgatctccaacatctgtcagatgccaaatgcctgggcgtccatcctgtggtacaacatgctgaccaacaatcccaagaatgtaaacttttttaccaagcccccaattggaacctgggatcaagtggccgaggtcctgagctggcagttctcctccaccaccaagcgaggactgagcatcgagcagctgactacactggcagagaaactcttgggacctggtgtgaattattcagggtgtcagatcacatgggctaaattttgcaaagaaaacatggctggcaagggcttctccttctgggtctggctggacaatatcattgaccttgtgaaaaagtacatcctggccctttggaacgaagggtacatcatgggctttatcagtaaggagcgggagcgggccatcttgagcactaagcctccaggcaccttcctgctaagattcagtgaaagcagcaaagaaggaggcgtcactttcacttgggtggagaaggacatcagcggtaagacccagatccagtccgtggaaccatacacaaagcagcagctgaacaacatgtcatttgctgaaatcatcatgggctataagatcatggatgctaccaatatcctggtgtctccactggtctatctctatcctgacattcccaaggaggaggcattcggaaagtattgtcggccagagagccaggagcatcctgaagctgacccaggtagcgctgccccatacctgaagaccaagtttatctgtgtgacaccaacgacctgcagcaataccattgacctgccgatgtccccccgcactttagattcattgatgcagtttggaaataatggtgaaggtgctgaaccctcagcaggagggcagtttgagtccctcacctttgacatggagttgacctcggagtgcgctacctcccccatgtgaggagctgagaacggaagctgcagaaagatacgactgaggcgcctacctgcattctgccacccctcacacagccaaaccccagatcatctgaaactactaactttgtggttccagattttttttaatctcctacttctgctatctttgagcaatctgggcacttttaaaaatagagaaatgagtgaatgtgggtgatctgcttttatctaaatgcaaataaggatgtgttctctgagacccatgatcaggggatgtggcggggggtggctagagggagaaaaaggaaatgtcttgtgttgttttgttcccctgccctcctttctcagcagctttttgttattgttgttgttgttcttagacaagtgcctcctggtgcctgcggcatccttctgcctgtttctgtaagcaaatgccacaggccacctatagctacatactcctggcattgcactttttaaccttgctgacatccaaatagaagataggactatctaagccctaggtttctttttaaattaagaaataataacaattaaagggcaaaaaacactgtatcagcatagcctttctgtatttaagaaacttaagcagccgggcatggtggctcacgcctgtaatcccagcactttgggaggccgaggcggatcataaggtcaggagatcaagaccatcctggctaacacggtgaaaccccgtctctactaaaagtacaaaaaattagctgggtgtggtggtgggcgcctgtagtcccagctactcgggaggctgaggcaggagaatcgcttgaacctgagaggcggaggttgcagtgagccaaaattgcaccactgcacactgcactccatcctgggcgacagtctgagactctgtctcaaaaaaaaaaaaaaaaaaaagaaacttcagttaacagcctccttggtgctttaagcattcagcttccttcaggctggtaatttatataatccctgaaacgggcttcaggtcaaacccttaagacatctgaagctgcaacctggcctttggtgttgaaataggaaggtttaaggagaatctaagcattttagacttttttttataaatagacttattttcctttgtaatgtattggccttttagtgagtaaggctgggcagagggtgcttacaaccttgactccctttctccctggacttgatctgctgtttcagaggctaggttgtttctgtgggtgccttatcagggctgggatacttctgattctggcttccttcctgccccaccctcccgaccccagtccccctgatcctgctagaggcatgtctccttgcgtgtctaaaggtccctcatcctgtttgttttaggaatcctggtctcaggacctcatggaagaagagggggagagagttacaggttggacatgatgcacactatggggccccagcgacgtgtctggttgagctcagggaatatggttcttagccagtttcttggtgatatccagtggcacttgtaatggcgtcttcattcagttcatgcagggcaaaggcttactgataaacttgagtctgccctcgtatgagggtgtatacctggcctccctctgaggctggtgactcctccctgctggggccccacaggtgaggcagaacagctagagggcctccccgcctgcccgccttggctggctagctcgcctctcctgtgcgtatgggaacacctagcacgtgctggatgggctgcctctgactcagaggcatggccggatttggcaactcaaaaccaccttgcctcagctgatcagagtttctgtggaattctgtttgttaaatcaaattagctggtctctgaattaagggggagacgaccttctctaagatgaacagggttcgccccagtcctcctgcctggagacagttgatgtgtcatgcagagctcttacttctccagcaacactcttcagtacataataagcttaactgataaacagaatatttagaaaggtgagacttgggcttaccattgggtttaaatcatagggacctagggcgagggttcagggcttctctggagcagatattgtcaagttcatggccttaggtagcatgtatctggtcttaactctgattgtagcaaaagttctgagaggagctgagccctgttgtggcccattaaagaacagggtcctcaggccctgcccgcttcctgtccactgccccctccccatccccagcccagccgagggaatcccgtgggttgcttacctacctataaggtggtttataagctgctgtcctggccactgcattcaaattccaatgtgtacttcatagtgtaaaaatttatattattgtgaggttttttgtcttttttttttttttttttttttggtatattgctgtatctactttaacttccagaaataaacgttatataggaaccgtc

SEQ ID NO: 114 - DNA, 4899 bp, Homo sapiens
gtcgcagccgagggaacaagccccaaccggatcctggacaggcaccccggcttggcgctgtctctccccctcggctcggagaggcccttcggcctgagggagcctcgccgcccgtccccggcacacgcgcagccccggcctctcggcctctgccggagaaacagcaggatggcccaatggaatcagctacagcagcttgacacacggtacctggagcagctccatcagctctacagtgacagcttcccaatggagctgcggcagtttctggccccttggattgagagtcaagattgggcatatgcggccagcaaagaatcacatgccactttggtgtttcataatctcctgggagagattgaccagcagtatagccgcttcctgcaagagtcgaatgttctctatcagcacaatctacgaagaatcaagcagtttcttcagagcaggtatcttgagaagccaatggagattgcccggattgtggcccggtgcctgtgggaagaatcacgccttctacagactgcagccactgcggcccagcaagggggccaggccaaccaccccacagcagccgtggtgacggagaagcagcagatgctggagcagcaccttcaggatgtccggaagagagtgcaggatctagaacagaaaatgaaagtggtagagaatctccaggatgactttgatttcaactataaaaccctcaagagtcaaggagacatgcaagatctgaatggaaacaaccagtcagtgaccaggcagaagatgcagcagctggaacagatgctcactgcgctggaccagatgcggagaagcatcgtgagtgagctggcggggcttttgtcagcgatggagtacgtgcagaaaactctcacggacgaggagctggctgactggaagaggcggcaacagattgcctgcattggaggcccgcccaacatctgcctagatcggctagaaaactggataacgtcattagcagaatctcaacttcagacccgtcaacaaattaagaaactggaggagttgcagcaaaaagtttcctacaaaggggaccccattgtacagcaccggccgatgctggaggagagaatcgtggagctgtttagaaacttaatgaaaagtgcctttgtggtggagcggcagccctgcatgcccatgcatcctgaccggcccctcgtcatcaagaccggcgtccagttcactactaaagtcaggttgctggtcaaattccctgagttgaattatcagcttaaaattaaagtgtgcattgacaaagactctggggacgttgcagctctcagaggatcccggaaatttaacattctgggcacaaacacaaaagtgatgaacatggaagaatccaacaacggcagcctctctgcagaattcaaacacttgaccctgagggagcagagatgtgggaatgggggccgagccaattgtgatgcttccctgattgtgactgaggagctgcacctgatcacctttgagaccgaggtgtatcaccaaggcctcaagattgacctagagacccactccttgccagttgtggtgatctccaacatctgtcagatgccaaatgcctgggcgtccatcctgtggtacaacatgctgaccaacaatcccaagaatgtaaacttttttaccaagcccccaattggaacctgggatcaagtggccgaggtcctgagctggcagttctcctccaccaccaagcgaggactgagcatcgagcagctgactacactggcagagaaactcttgggacctggtgtgaattattcagggtgtcagatcacatgggctaaattttgcaaagaaaacatggctggcaagggcttctccttctgggtctggctggacaatatcattgaccttgtgaaaaagtacatcctggccctttggaacgaagggtacatcatgggctttatcagtaaggagcgggagcgggccatcttgagcactaagcctccaggcaccttcctgctaagattcagtgaaagcagcaaagaaggaggcgtcactttcacttgggtggagaaggacatcagcggtaagacccagatccagtccgtggaaccatacacaaagcagcagctgaacaacatgtcatttgctgaaatcatcatgggctataagatcatggatgctaccaatatcctggtgtctccactggtctatctctatcctgacattcccaaggaggaggcattcggaaagtattgtcggccagagagccaggagcatcctgaagctgacccaggcgctgccccatacctgaagaccaagtttatctgtgtgacaccaacgacctgcagcaataccattgacctgccgatgtccccccgcactttagattcattgatgcagtttggaaataatggtgaaggtgctgaaccctcagcaggagggcagtttgagtccctcacctttgacatggagttgacctcggagtgcgctacctcccccatgtgaggagctgagaacggaagctgcagaaagatacgactgaggcgcctacctgcattctgccacccctcacacagccaaaccccagatcatctgaaactactaactttgtggttccagattttttttaatctcctacttctgctatctttgagcaatctgggcacttttaaaaatagagaaatgagtgaatgtgggtgatctgcttttatctaaatgcaaataaggatgtgttctctgagacccatgatcaggggatgtggcggggggtggctagagggagaaaaaggaaatgtcttgtgttgttttgttcccctgccctcctttctcagcagctttttgttattgttgttgttgttcttagacaagtgcctcctggtgcctgcggcatccttctgcctgtttctgtaagcaaatgccacaggccacctatagctacatactcctggcattgcactttttaaccttgctgacatccaaatagaagataggactatctaagccctaggtttctttttaaattaagaaataataacaattaaagggcaaaaaacactgtatcagcatagcctttctgtatttaagaaacttaagcagccgggcatggtggctcacgcctgtaatcccagcactttgggaggccgaggcggatcataaggtcaggagatcaagaccatcctggctaacacggtgaaaccccgtctctactaaaagtacaaaaaattagctgggtgtggtggtgggcgcctgtagtcccagctactcgggaggctgaggcaggagaatcgcttgaacctgagaggcggaggttgcagtgagccaaaattgcaccactgcacactgcactccatcctgggcgacagtctgagactctgtctcaaaaaaaaaaaaaaaaaaaagaaacttcagttaacagcctccttggtgctttaagcattcagcttccttcaggctggtaatttatataatccctgaaacgggcttcaggtcaaacccttaagacatctgaagctgcaacctggcctttggtgttgaaataggaaggtttaaggagaatctaagcattttagacttttttttataaatagacttattttcctttgtaatgtattggccttttagtgagtaaggctgggcagagggtgcttacaaccttgactccctttctccctggacttgatctgctgtttcagaggctaggttgtttctgtgggtgccttatcagggctgggatacttctgattctggcttccttcctgccccaccctcccgaccccagtccccctgatcctgctagaggcatgtctccttgcgtgtctaaaggtccctcatcctgtttgttttaggaatcctggtctcaggacctcatggaagaagagggggagagagttacaggttggacatgatgcacactatggggccccagcgacgtgtctggttgagctcagggaatatggttcttagccagtttcttggtgatatccagtggcacttgtaatggcgtcttcattcagttcatgcagggcaaaggcttactgataaacttgagtctgccctcgtatgagggtgtatacctggcctccctctgaggctggtgactcctccctgctggggccccacaggtgaggcagaacagctagagggcctccccgcctgcccgccttggctggctagctcgcctctcctgtgcgtatgggaacacctagcacgtgctggatgggctgcctctgactcagaggcatggccggatttggcaactcaaaaccaccttgcctcagctgatcagagtttctgtggaattctgtttgttaaatcaaattagctggtctctgaattaagggggagacgaccttctctaagatgaacagggttcgccccagtcctcctgcctggagacagttgatgtgtcatgcagagctcttacttctccagcaacactcttcagtacataataagcttaactgataaacagaatatttagaaaggtgagacttgggcttaccattgggtttaaatcatagggacctagggcgagggttcagggcttctctggagcagatattgtcaagttcatggccttaggtagcatgtatctggtcttaactctgattgtagcaaaagttctgagaggagctgagccctgttgtggcccattaaagaacagggtcctcaggccctgcccgcttcctgtccactgccccctccccatccccagcccagccgagggaatcccgtgggttgcttacctacctataaggtggtttataagctgctgtcctggccactgcattcaaattccaatgtgtacttcatagtgtaaaaatttatattattgtgaggttttttgtcttttttttttttttttttttttggtatattgctgtatctactttaacttccagaaataaacgttatataggaaccgtc

SEQ ID NO: 115 - DNA, 4849 bp, Homo sapiens
gtcgcagccgagggaacaagccccaaccggatcctggacaggcaccccggcttggcgctgtctctccccctcggctcggagaggcccttcggcctgagggagcctcgccgcccgtccccggcacacgcgcagccccggcctctcggcctctgccggagaaacaggatggcccaatggaatcagctacagcagcttgacacacggtacctggagcagctccatcagctctacagtgacagcttcccaatggagctgcggcagtttctggccccttggattgagagtcaagattgggcatatgcggccagcaaagaatcacatgccactttggtgtttcataatctcctgggagagattgaccagcagtatagccgcttcctgcaagagtcgaatgttctctatcagcacaatctacgaagaatcaagcagtttcttcagagcaggtatcttgagaagccaatggagattgcccggattgtggcccggtgcctgtgggaagaatcacgccttctacagactgcagccactgcggcccagcaagggggccaggccaaccaccccacagcagccgtggtgacggagaagcagcagatgctggagcagcaccttcaggatgtccggaagagagtgcaggatctagaacagaaaatgaaagtggtagagaatctccaggatgactttgatttcaactataaaaccctcaagagtcaaggagacatgcaagatctgaatggaaacaaccagtcagtgaccaggcagaagatgcagcagctggaacagatgctcactgcgctggaccagatgcggagaagcatcgtgagtgagctggcggggcttttgtcagcgatggagtacgtgcagaaaactctcacggacgaggagctggctgactggaagaggcggcaacagattgcctgcattggaggcccgcccaacatctgcctagatcggctagaaaactggataacgtcattagcagaatctcaacttcagacccgtcaacaaattaagaaactggaggagttgcagcaaaaagtttcctacaaaggggaccccattgtacagcaccggccgatgctggaggagagaatcgtggagctgtttagaaacttaatgaaaagtgcctttgtggtggagcggcagccctgcatgcccatgcatcctgaccggcccctcgtcatcaagaccggcgtccagttcactactaaagtcaggttgctggtcaaattccctgagttgaattatcagcttaaaattaaagtgtgcattgacaaagactctggggacgttgcagctctcagaggatcccggaaatttaacattctgggcacaaacacaaaagtgatgaacatggaagaatccaacaacggcagcctctctgcagaattcaaacacttgaccctgagggagcagagatgtgggaatgggggccgagccaattgtgatgcttccctgattgtgactgaggagctgcacctgatcacctttgagaccgaggtgtatcaccaaggcctcaagattgacctagagacccactccttgccagttgtggtgatctccaacatctgtcagatgccaaatgcctgggcgtccatcctgtggtacaacatgctgaccaacaatcccaagaatgtaaacttttttaccaagcccccaattggaacctgggatcaagtggccgaggtcctgagctggcagttctcctccaccaccaagcgaggactgagcatcgagcagctgactacactggcagagaaactcttgggacctggtgtgaattattcagggtgtcagatcacatgggctaaattttgcaaagaaaacatggctggcaagggcttctccttctgggtctggctggacaatatcattgaccttgtgaaaaagtacatcctggccctttggaacgaagggtacatcatgggctttatcagtaaggagcgggagcgggccatcttgagcactaagcctccaggcaccttcctgctaagattcagtgaaagcagcaaagaaggaggcgtcactttcacttgggtggagaaggacatcagcggtaagacccagatccagtccgtggaaccatacacaaagcagcagctgaacaacatgtcatttgctgaaatcatcatgggctataagatcatggatgctaccaatatcctggtgtctccactggtctatctctatcctgacattcccaaggaggaggcattcggaaagtattgtcggccagagagccaggagcatcctgaagctgacccaggtagcgctgccccatacctgaagaccaagtttatctgtgtgacaccattcattgatgcagtttggaaataatggtgaaggtgctgaaccctcagcaggagggcagtttgagtccctcacctttgacatggagttgacctcggagtgcgctacctcccccatgtgaggagctgagaacggaagctgcagaaagatacgactgaggcgcctacctgcattctgccacccctcacacagccaaaccccagatcatctgaaactactaactttgtggttccagattttttttaatctcctacttctgctatctttgagcaatctgggcacttttaaaaatagagaaatgagtgaatgtgggtgatctgcttttatctaaatgcaaataaggatgtgttctctgagacccatgatcaggggatgtggcggggggtggctagagggagaaaaaggaaatgtcttgtgttgttttgttcccctgccctcctttctcagcagctttttgttattgttgttgttgttcttagacaagtgcctcctggtgcctgcggcatccttctgcctgtttctgtaagcaaatgccacaggccacctatagctacatactcctggcattgcactttttaaccttgctgacatccaaatagaagataggactatctaagccctaggtttctttttaaattaagaaataataacaattaaagggcaaaaaacactgtatcagcatagcctttctgtatttaagaaacttaagcagccgggcatggtggctcacgcctgtaatcccagcactttgggaggccgaggcggatcataaggtcaggagatcaagaccatcctggctaacacggtgaaaccccgtctctactaaaagtacaaaaaattagctgggtgtggtggtgggcgcctgtagtcccagctactcgggaggctgaggcaggagaatcgcttgaacctgagaggcggaggttgcagtgagccaaaattgcaccactgcacactgcactccatcctgggcgacagtctgagactctgtctcaaaaaaaaaaaaaaaaaaaagaaacttcagttaacagcctccttggtgctttaagcattcagcttccttcaggctggtaatttatataatccctgaaacgggcttcaggtcaaacccttaagacatctgaagctgcaacctggcctttggtgttgaaataggaaggtttaaggagaatctaagcattttagacttttttttataaatagacttattttcctttgtaatgtattggccttttagtgagtaaggctgggcagagggtgcttacaaccttgactccctttctccctggacttgatctgctgtttcagaggctaggttgtttctgtgggtgccttatcagggctgggatacttctgattctggcttccttcctgccccaccctcccgaccccagtccccctgatcctgctagaggcatgtctccttgcgtgtctaaaggtccctcatcctgtttgttttaggaatcctggtctcaggacctcatggaagaagagggggagagagttacaggttggacatgatgcacactatggggccccagcgacgtgtctggttgagctcagggaatatggttcttagccagtttcttggtgatatccagtggcacttgtaatggcgtcttcattcagttcatgcagggcaaaggcttactgataaacttgagtctgccctcgtatgagggtgtatacctggcctccctctgaggctggtgactcctccctgctggggccccacaggtgaggcagaacagctagagggcctccccgcctgcccgccttggctggctagctcgcctctcctgtgcgtatgggaacacctagcacgtgctggatgggctgcctctgactcagaggcatggccggatttggcaactcaaaaccaccttgcctcagctgatcagagtttctgtggaattctgtttgttaaatcaaattagctggtctctgaattaagggggagacgaccttctctaagatgaacagggttcgccccagtcctcctgcctggagacagttgatgtgtcatgcagagctcttacttctccagcaacactcttcagtacataataagcttaactgataaacagaatatttagaaaggtgagacttgggcttaccattgggtttaaatcatagggacctagggcgagggttcagggcttctctggagcagatattgtcaagttcatggccttaggtagcatgtatctggtcttaactctgattgtagcaaaagttctgagaggagctgagccctgttgtggcccattaaagaacagggtcctcaggccctgcccgcttcctgtccactgccccctccccatccccagcccagccgagggaatcccgtgggttgcttacctacctataaggtggtttataagctgctgtcctggccactgcattcaaattccaatgtgtacttcatagtgtaaaaatttatattattgtgaggttttttgtcttttttttttttttttttttttggtatattgctgtatctactttaacttccagaaataaacgttatataggaaccgtc

SEQ ID NO: 116 - protein, 770 aa, Homo sapiens
MAQWNQLQQLDTRYLEQLHQLYSDSFPMELRQFLAPWIESQDWAYAASKESHATLVFHNLLGEIDQQYSRFLQESNVLYQHNLRRIKQFLQSRYLEKPMEIARIVARCLWEESRLLQTAATAAQQGGQANHPTAAVVTEKQQMLEQHLQDVRKRVQDLEQKMKVVENLQDDFDFNYKTLKSQGDMQDLNGNNQSVTRQKMQQLEQMLTALDQMRRSIVSELAGLLSAMEYVQKTLTDEELADWKRRQQIACIGGPPNICLDRLENWITSLAESQLQTRQQIKKLEELQQKVSYKGDPIVQHRPMLEERIVELFRNLMKSAFVVERQPCMPMHPDRPLVIKTGVQFTTKVRLLVKFPELNYQLKIKVCIDKDSGDVAALRGSRKFNILGTNTKVMNMEESNNGSLSAEFKHLTLREQRCGNGGRANCDASLIVTEELHLITFETEVYHQGLKIDLETHSLPVVVISNICQMPNAWASILWYNMLTNNPKNVNFFTKPPIGTWDQVAEVLSWQFSSTTKRGLSIEQLTTLAEKLLGPGVNYSGCQITWAKFCKENMAGKGFSFWVWLDNIIDLVKKYILALWNEGYIMGFISKERERAILSTKPPGTFLLRFSESSKEGGVTFTWVEKDISGKTQIQSVEPYTKQQLNNMSFAEIIMGYKIMDATNILVSPLVYLYPDIPKEEAFGKYCRPESQEHPEADPGSAAPYLKTKFICVTPTTCSNTIDLPMSPRTLDSLMQFGNNGEGAEPSAGGQFESLTFDMELTSECATSPM

SEQ ID NO: 117 - protein, 769 aa, Homo sapiens
MAQWNQLQQLDTRYLEQLHQLYSDSFPMELRQFLAPWIESQDWAYAASKESHATLVFHNLLGEIDQQYSRFLQESNVLYQHNLRRIKQFLQSRYLEKPMEIARIVARCLWEESRLLQTAATAAQQGGQANHPTAAVVTEKQQMLEQHLQDVRKRVQDLEQKMKVVENLQDDFDFNYKTLKSQGDMQDLNGNNQSVTRQKMQQLEQMLTALDQMRRSIVSELAGLLSAMEYVQKTLTDEELADWKRRQQIACIGGPPNICLDRLENWITSLAESQLQTRQQIKKLEELQQKVSYKGDPIVQHRPMLEERIVELFRNLMKSAFVVERQPCMPMHPDRPLVIKTGVQFTTKVRLLVKFPELNYQLKIKVCIDKDSGDVAALRGSRKFNILGTNTKVMNMEESNNGSLSAEFKHLTLREQRCGNGGRANCDASLIVTEELHLITFETEVYHQGLKIDLETHSLPVVVISNICQMPNAWASILWYNMLTNNPKNVNFFTKPPIGTWDQVAEVLSWQFSSTTKRGLSIEQLTTLAEKLLGPGVNYSGCQITWAKFCKENMAGKGFSFWVWLDNIIDLVKKYILALWNEGYIMGFISKERERAILSTKPPGTFLLRFSESSKEGGVTFTWVEKDISGKTQIQSVEPYTKQQLNNMSFAEIIMGYKIMDATNILVSPLVYLYPDIPKEEAFGKYCRPESQEHPEADPGAAPYLKTKFICVTPTTCSNTIDLPMSPRTLDSLMQFGNNGEGAEPSAGGQFESLTFDMELTSECATSPM

SEQ ID NO: 118 - protein, 722 aa, Homo sapiens
MAQWNQLQQLDTRYLEQLHQLYSDSFPMELRQFLAPWIESQDWAYAASKESHATLVFHNLLGEIDQQYSRFLQESNVLYQHNLRRIKQFLQSRYLEKPMEIARIVARCLWEESRLLQTAATAAQQGGQANHPTAAVVTEKQQMLEQHLQDVRKRVQDLEQKMKVVENLQDDFDFNYKTLKSQGDMQDLNGNNQSVTRQKMQQLEQMLTALDQMRRSIVSELAGLLSAMEYVQKTLTDEELADWKRRQQIACIGGPPNICLDRLENWITSLAESQLQTRQQIKKLEELQQKVSYKGDPIVQHRPMLEERIVELFRNLMKSAFVVERQPCMPMHPDRPLVIKTGVQFTTKVRLLVKFPELNYQLKIKVCIDKDSGDVAALRGSRKFNILGTNTKVMNMEESNNGSLSAEFKHLTLREQRCGNGGRANCDASLIVTEELHLITFETEVYHQGLKIDLETHSLPVVVISNICQMPNAWASILWYNMLTNNPKNVNFFTKPPIGTWDQVAEVLSWQFSSTTKRGLSIEQLTTLAEKLLGPGVNYSGCQITWAKFCKENMAGKGFSFWVWLDNIIDLVKKYILALWNEGYIMGFISKERERAILSTKPPGTFLLRFSESSKEGGVTFTWVEKDISGKTQIQSVEPYTKQQLNNMSFAEIIMGYKIMDATNILVSPLVYLYPDIPKEEAFGKYCRPESQEHPEADPGSAAPYLKTKFICVTPFIDAVWK

SEQ ID NO: 119 - DNA, 20 bp, Artificial Sequence
  Synthetic
  misc_feature (1)..(20): modified with phosphorothioate bond
  misc_feature (20)..(20): modified with two hexaethylene glycol spacers
  misc_feature (20)..(20): modified with 3'-cholesteryl with tetraethylene glycol
gtactacacttttaattact

SEQ ID NO: 120 - DNA, 20 bp, Artificial Sequence
  Synthetic
  misc_feature (1)..(20): modified with phosphorothioate bond
  misc_feature (20)..(20): modified with two hexaethylene glycol spacers
  misc_feature (20)..(20): modified with 3'-cholesteryl with tetraethylene glycol
tgtatattgatgtcagtact

SEQ ID NO: 121 - DNA, 20 bp, Artificial Sequence
  Synthetic
  misc_feature (1)..(20): modified with phosphorothioate bond
  misc_feature (20)..(20): modified with two hexaethylene glycol spacers
  misc_feature (20)..(20): modified with 3'-cholesteryl with tetraethylene glycol
tacattgtctattagtgtat

SEQ ID NO: 122 - DNA, 20 bp, Artificial Sequence
  Synthetic
  misc_feature (1)..(20): modified with phosphorothioate bond
  misc_feature (20)..(20): modified with two hexaethylene glycol spacers
  misc_feature (20)..(20): modified with 3'-cholesteryl with tetraethylene glycol
tgactctcaattctgttaca

SEQ ID NO: 123 - DNA, 20 bp, Artificial Sequence
  Synthetic
  misc_feature (1)..(20): modified with phosphorothioate bond
  misc_feature (20)..(20): modified with two hexaethylene glycol spacers
  misc_feature (20)..(20): modified with 3'-cholesteryl with tetraethylene glycol
tcacagggctatttctgact

SEQ ID NO: 124 - DNA, 20 bp, Artificial Sequence
  Synthetic
  misc_feature (1)..(20): modified with phosphorothioate bond
  misc_feature (20)..(20): modified with two hexaethylene glycol spacers
  misc_feature (20)..(20): modified with 3'-cholesteryl with tetraethylene glycol
aatcagtcacatatatcaca

SEQ ID NO: 125 - DNA, 20 bp, Artificial Sequence
  Synthetic
  misc_feature (1)..(20): modified with phosphorothioate bond
  misc_feature (20)..(20): modified with two hexaethylene glycol spacers
  misc_feature (20)..(20): modified with 3'-cholesteryl with tetraethylene glycol
tgtaactttagttaaaatca

SEQ ID NO: 126 - DNA, 20 bp, Artificial Sequence
  Synthetic
  misc_feature (1)..(20): modified with phosphorothioate bond
  misc_feature (20)..(20): modified with two hexaethylene glycol spacers
  misc_feature (20)..(20): modified with 3'-cholesteryl with tetraethylene glycol
ctattaaaccacatttgtaa

SEQ ID NO: 127 - DNA, 20 bp, Artificial Sequence
  Synthetic
  misc_feature (1)..(20): modified with phosphorothioate bond
  misc_feature (20)..(20): modified with two hexaethylene glycol spacers
  misc_feature (20)..(20): modified with 3'-cholesteryl with tetraethylene glycol
actactatgctttctctatt

SEQ ID NO: 128 - DNA, 20 bp, Artificial Sequence
  Synthetic
  misc_feature (1)..(20): modified with phosphorothioate bond
  misc_feature (20)..(20): modified with two hexaethylene glycol spacers
  misc_feature (20)..(20): modified with 3'-cholesteryl with tetraethylene glycol
ccaccatttcttgaaactac

SEQ ID NO: 129 - DNA, 20 bp, Artificial Sequence
  Synthetic
  misc_feature (1)..(20): modified with phosphorothioate bond
  misc_feature (20)..(20): modified with two hexaethylene glycol spacers
  misc_feature (20)..(20): modified with 3'-cholesteryl with tetraethylene glycol
tttccaatagttttaccacc

SEQ ID NO: 130 - DNA, 20 bp, Artificial Sequence
  Synthetic
  misc_feature (1)..(20): modified with phosphorothioate bond
  misc_feature (20)..(20): modified with two hexaethylene glycol spacers
  misc_feature (20)..(20): modified with 3'-cholesteryl with tetraethylene glycol
gtttttgcataaggatttcc

SEQ ID NO: 131 - DNA, 20 bp, Artificial Sequence
  Synthetic
  misc_feature (1)..(20): modified with phosphorothioate bond
  misc_feature (20)..(20): modified with two hexaethylene glycol spacers
  misc_feature (20)..(20): modified with 3'-cholesteryl with tetraethylene glycol
gtggaaatttggtttgtttt

SEQ ID NO: 132 - DNA, 20 bp, Artificial Sequence
  Synthetic
  misc_feature (1)..(20): modified with phosphorothioate bond
  misc_feature (20)..(20): modified with two hexaethylene glycol spacers
  misc_feature (20)..(20): modified with 3'-cholesteryl with tetraethylene glycol
tgtggctcagtgtaggtgga

SEQ ID NO: 133 - DNA, 20 bp, Artificial Sequence
  Synthetic
  misc_feature (1)..(20): modified with phosphorothioate bond
  misc_feature (20)..(20): modified with two hexaethylene glycol spacers
  misc_feature (20)..(20): modified with 3'-cholesteryl with tetraethylene glycol
gtattaattcttatatgtgg

SEQ ID NO: 134 - DNA, 20 bp, Artificial Sequence
  Synthetic
  misc_feature (1)..(20): modified with phosphorothioate bond
  misc_feature (20)..(20): modified with two hexaethylene glycol spacers
  misc_feature (20)..(20): modified with 3'-cholesteryl with tetraethylene glycol
ttagttttacacttaggtct

SEQ ID NO: 135 - DNA, 20 bp, Artificial Sequence
  Synthetic
  misc_feature (1)..(20): modified with phosphorothioate bond
  misc_feature (20)..(20): modified with two hexaethylene glycol spacers
  misc_feature (20)..(20): modified with 3'-cholesteryl with tetraethylene glycol
acacagtttagagttttagt

SEQ ID NO: 136 - DNA, 20 bp, Artificial Sequence
  Synthetic
  misc_feature (1)..(20): modified with phosphorothioate bond
  misc_feature (20)..(20): modified with two hexaethylene glycol spacers
  misc_feature (20)..(20): modified with 3'-cholesteryl with tetraethylene glycol
gatcacagatttttctctct

SEQ ID NO: 137 - DNA, 20 bp, Artificial Sequence
  Synthetic
  misc_feature (1)..(20): modified with phosphorothioate bond
  misc_feature (20)..(20): modified with two hexaethylene glycol spacers
  misc_feature (20)..(20): modified with 3'-cholesteryl with tetraethylene glycol
ttataggcaatccatgatca

SEQ ID NO: 138 - DNA, 20 bp, Artificial Sequence
  Synthetic
  misc_feature (1)..(20): modified with phosphorothioate bond
  misc_feature (20)..(20): modified with two hexaethylene glycol spacers
  misc_feature (20)..(20): modified with 3'-cholesteryl with tetraethylene glycol
catttcagtttgttcttttg

SEQ ID NO: 139 - DNA, 20 bp, Artificial Sequence
  Synthetic
  misc_feature (1)..(20): modified with phosphorothioate bond
  misc_feature (20)..(20): modified with two hexaethylene glycol spacers
  misc_feature (20)..(20): modified with 3'-cholesteryl with tetraethylene glycol
cccaggcaacaaggccattt

SEQ ID NO: 140 - DNA, 20 bp, Artificial Sequence
  Synthetic
  misc_feature (1)..(20): modified with phosphorothioate bond
  misc_feature (20)..(20): modified with two hexaethylene glycol spacers
  misc_feature (20)..(20): modified with 3'-cholesteryl with tetraethylene glycol
gaacctcgggtgccacccca

SEQ ID NO: 141 - DNA, 20 bp, Artificial Sequence
  Synthetic
  misc_feature (1)..(20): modified with phosphorothioate bond
  misc_feature (20)..(20): modified with 3'-cholesteryl with tetraethylene glycol
  misc_feature (20)..(20): modified with two hexaethylene glycol spacers
cgtccttgatttcctcagcg

SEQ ID NO: 142 - DNA, 20 bp, Artificial Sequence
  Synthetic
  misc_feature (1)..(20): modified with phosphorothioate bond
  misc_feature (20)..(20): modified with two hexaethylene glycol spacers
  misc_feature (20)..(20): modified with 3'-cholesteryl with tetraethylene glycol
acacccttggtgtgtcagcg

SEQ ID NO: 143 - DNA, 20 bp, Artificial Sequence
  Synthetic
  misc_feature (1)..(20): modified with phosphorothioate bond
  misc_feature (20)..(20): modified with two hexaethylene glycol spacers
  misc_feature (20)..(20): modified with 3'-cholesteryl with tetraethylene glycol
ttctgctctagcctcacacc

SEQ ID NO: 144 - DNA, 20 bp, Artificial Sequence
  Synthetic
  misc_feature (1)..(20): modified with phosphorothioate bond
  misc_feature (20)..(20): modified with two hexaethylene glycol spacers
  misc_feature (20)..(20): modified with 3'-cholesteryl with tetraethylene glycol
ggagagagctagtctctttc

SEQ ID NO: 145 - DNA, 20 bp, Artificial Sequence
  Synthetic
  misc_feature (1)..(20): modified with phosphorothioate bond
  misc_feature (20)..(20): modified with two hexaethylene glycol spacers
  misc_feature (20)..(20): modified with 3'-cholesteryl with tetraethylene glycol
aggacctctctctgcaggag

SEQ ID NO: 146 - DNA, 20 bp, Artificial Sequence
  Synthetic
  misc_feature (1)..(20): modified with phosphorothioate bond
  misc_feature (20)..(20): modified with two hexaethylene glycol spacers
  misc_feature (20)..(20): modified with 3'-cholesteryl with tetraethylene glycol
atgggaactcttttcaggac

SEQ ID NO: 147 - DNA, 20 bp, Artificial Sequence
  Synthetic
  misc_feature (1)..(20): modified with phosphorothioate bond
  misc_feature (20)..(20): modified with two hexaethylene glycol spacers
  misc_feature (20)..(20): modified with 3'-cholesteryl with tetraethylene glycol
gcatttcactgtggaatggg

SEQ ID NO: 148 - DNA, 20 bp, Artificial Sequence
  Synthetic
  misc_feature (1)..(20): modified with phosphorothioate bond
  misc_feature (20)..(20): modified with two hexaethylene glycol spacers
  misc_feature (20)..(20): modified with 3'-cholesteryl with tetraethylene glycol
tttataaaaatgcttgcatt

SEQ ID NO: 149 - DNA, 20 bp, Artificial Sequence
  Synthetic
  misc_feature (1)..(20): modified with phosphorothioate bond
  misc_feature (20)..(20): modified with two hexaethylene glycol spacers
  misc_feature (20)..(20): modified with 3'-cholesteryl with tetraethylene glycol
cttcccattagctcatttat

SEQ ID NO: 150 - DNA, 20 bp, Artificial Sequence
  Synthetic
  misc_feature (1)..(20): modified with phosphorothioate bond
  misc_feature (20)..(20): modified with two hexaethylene glycol spacers
  misc_feature (20)..(20): modified with 3'-cholesteryl with tetraethylene glycol
tagataagctacccccttcc

SEQ ID NO: 151 - DNA, 20 bp, Artificial Sequence
  Synthetic
  misc_feature (1)..(20): modified with phosphorothioate bond
  misc_feature (20)..(20): modified with two hexaethylene glycol spacers
  misc_feature (20)..(20): modified with 3'-cholesteryl with tetraethylene glycol
tttgctccctatgtgtagat

SEQ ID NO: 152 - DNA, 20 bp, Artificial Sequence
  Synthetic
  misc_feature (1)..(20): modified with phosphorothioate bond
  misc_feature (20)..(20): modified with two hexaethylene glycol spacers
  misc_feature (20)..(20): modified with 3'-cholesteryl with tetraethylene glycol
ggtcctaactggttttttgc

SEQ ID NO: 153 - DNA, 20 bp, Artificial Sequence
  Synthetic
  misc_feature (1)..(20): modified with phosphorothioate bond
  misc_feature (20)..(20): modified with two hexaethylene glycol spacers
  misc_feature (20)..(20): modified with 3'-cholesteryl with tetraethylene glycol
cagatggcaacacctggtcc

SEQ ID NO: 154 - DNA, 20 bp, Artificial Sequence
  Synthetic
  misc_feature (1)..(20): modified with phosphorothioate bond
  misc_feature (20)..(20): modified with two hexaethylene glycol spacers
  misc_feature (20)..(20): modified with 3'-cholesteryl with tetraethylene glycol
gattcacgctctgtgcagat

SEQ ID NO: 155 - DNA, 20 bp, Artificial Sequence
  Synthetic
  misc_feature (1)..(20): modified with phosphorothioate bond
  misc_feature (20)..(20): modified with two hexaethylene glycol spacers
  misc_feature (20)..(20): modified with 3'-cholesteryl with tetraethylene glycol
gcctgcataataaaaggttg

SEQ ID NO: 156 - DNA, 20 bp, Artificial Sequence
  Synthetic
  misc_feature (1)..(20): modified with phosphorothioate bond
  misc_feature (20)..(20): modified with two hexaethylene glycol spacers
  misc_feature (20)..(20): modified with 3'-cholesteryl with tetraethylene glycol
tcaggccaaggacctgcctg

SEQ ID NO: 157 - DNA, 20 bp, Artificial Sequence
  Synthetic
  misc_feature (1)..(20): modified with phosphorothioate bond
  misc_feature (20)..(20): modified with two hexaethylene glycol spacers
  misc_feature (20)..(20): modified with 3'-cholesteryl with tetraethylene glycol
taagcaatgtggagtagctc

SEQ ID NO: 158 - DNA, 20 bp, Artificial Sequence
  Synthetic
  misc_feature (1)..(20): modified with phosphorothioate bond
  misc_feature (20)..(20): modified with two hexaethylene glycol spacers
  misc_feature (20)..(20): modified with 3'-cholesteryl with tetraethylene glycol
acaataggaaagagataagc

SEQ ID NO: 159 - DNA, 20 bp, Artificial Sequence
  Synthetic
  misc_feature (1)..(20): modified with phosphorothioate bond
  misc_feature (20)..(20): modified with two hexaethylene glycol spacers
  misc_feature (20)..(20): modified with 3'-cholesteryl with tetraethylene glycol
ttatttagcacatgcacaat

SEQ ID NO: 160 - DNA, 20 bp, Artificial Sequence
  Synthetic
  misc_feature (1)..(20): modified with phosphorothioate bond
  misc_feature (20)..(20): modified with two hexaethylene glycol spacers
  misc_feature (20)..(20): modified with 3'-cholesteryl with tetraethylene glycol
tggctccacctccccttatt

SEQ ID NO: 161 - DNA, 20 bp, Artificial Sequence
  Synthetic
  misc_feature (1)..(20): modified with phosphorothioate bond
  misc_feature (20)..(20): modified with two hexaethylene glycol spacers
  misc_feature (20)..(20): modified with 3'-cholesteryl with tetraethylene glycol
gcatgtccaccatggtggct

SEQ ID NO: 162 - DNA, 20 bp, Artificial Sequence
  Synthetic
  misc_feature (1)..(20): modified with phosphorothioate bond
  misc_feature (20)..(20): modified with two hexaethylene glycol spacers
  misc_feature (20)..(20): modified with 3'-cholesteryl with tetraethylene glycol
agctgcacggagagaaaggg

SEQ ID NO: 163 - DNA, 20 bp, Artificial Sequence
  Synthetic
  misc_feature (1)..(20): modified with phosphorothioate bond
  misc_feature (20)..(20): modified with two hexaethylene glycol spacers
  misc_feature (20)..(20): modified with 3'-cholesteryl with tetraethylene glycol
gcatgttgtgagttgttggg

SEQ ID NO: 164 - DNA, 20 bp, Artificial Sequence
  Synthetic
  misc_feature (1)..(20): modified with phosphorothioate bond
  misc_feature (20)..(20): modified with two hexaethylene glycol spacers
  misc_feature (20)..(20): modified with 3'-cholesteryl with tetraethylene glycol
tcagataaggaagctggaag

SEQ ID NO: 165 - DNA, 20 bp, Artificial Sequence
  Synthetic
  misc_feature (1)..(20): modified with phosphorothioate bond
  misc_feature (20)..(20): modified with two hexaethylene glycol spacers
  misc_feature (20)..(20): modified with 3'-cholesteryl with tetraethylene glycol
gaccttagtacatactcaga

SEQ ID NO: 166 - DNA, 20 bp, Artificial Sequence
  Synthetic
  misc_feature (1)..(20): modified with phosphorothioate bond
  misc_feature (20)..(20): modified with two hexaethylene glycol spacers
  misc_feature (20)..(20): modified with 3'-cholesteryl with tetraethylene glycol
gaagtaaacacagtggacct

SEQ ID NO: 167 - DNA, 20 bp, Artificial Sequence
  Synthetic
  misc_feature (1)..(20): modified with phosphorothioate bond
  misc_feature (20)..(20): modified with two hexaethylene glycol spacers
  misc_feature (20)..(20): modified with 3'-cholesteryl with tetraethylene glycol
gtatgtgaagtaaacacagt

SEQ ID NO: 168 - DNA, 20 bp, Artificial Sequence
  Synthetic
  misc_feature (1)..(20): modified with phosphorothioate bond
  misc_feature (20)..(20): modified with two hexaethylene glycol spacers
  misc_feature (20)..(20): modified with 3'-cholesteryl with tetraethylene glycol
gtaaacacagtatgtgaagt

SEQ ID NO: 169 - DNA, 20 bp, Artificial Sequence
  Synthetic
  misc_feature (1)..(20): modified with phosphorothioate bond
  misc_feature (20)..(20): modified with two hexaethylene glycol spacers
  misc_feature (20)..(20): modified with 3'-cholesteryl with tetraethylene glycol
aggtgggtatgtgaagtaaa

SEQ ID NO: 170 - DNA, 20 bp, Artificial Sequence
  Synthetic
  misc_feature (1)..(20): modified with phosphorothioate bond
  misc_feature (20)..(20): modified with two hexaethylene glycol spacers
  misc_feature (20)..(20): modified with 3'-cholesteryl with tetraethylene glycol
atcagcaagcttcacatacg

SEQ ID NO: 171 - DNA, 20 bp, Artificial Sequence
  Synthetic
  misc_feature (1)..(20): modified with phosphorothioate bond
  misc_feature (20)..(20): modified with two hexaethylene glycol spacers
  misc_feature (20)..(20): modified with 3'-cholesteryl with tetraethylene glycol
ggagcttcctgggtaatcag

SEQ ID NO: 172 - DNA, 20 bp, Artificial Sequence
  Synthetic
  misc_feature (1)..(20): modified with phosphorothioate bond
  misc_feature (20)..(20): modified with two hexaethylene glycol spacers
  misc_feature (20)..(20): modified with 3'-cholesteryl with tetraethylene glycol
agcagctctggcacagaggg

SEQ ID NO: 173 - DNA, 20 bp, Artificial Sequence
  Synthetic
  misc_feature (1)..(20): modified with phosphorothioate bond
  misc_feature (20)..(20): modified with two hexaethylene glycol spacers
  misc_feature (20)..(20): modified with 3'-cholesteryl with tetraethylene glycol
aaacatgtataaggaagcag

SEQ ID NO: 174 - DNA, 20 bp, Artificial Sequence
  Synthetic
  misc_feature (1)..(20): modified with phosphorothioate bond
  misc_feature (20)..(20): modified with two hexaethylene glycol spacers
  misc_feature (20)..(20): modified with 3'-cholesteryl with tetraethylene glycol
ggaagatcgggctgtaaaca

SEQ ID NO: 175 - DNA, 20 bp, Artificial Sequence
  Synthetic
  misc_feature (1)..(20): modified with phosphorothioate bond
  misc_feature (20)..(20): modified with two hexaethylene glycol spacers
  misc_feature (20)..(20): modified with 3'-cholesteryl with tetraethylene glycol
acttctcttctaacaaggag

SEQ ID NO: 176 - DNA, 20 bp, Artificial Sequence
  Synthetic
  misc_feature (1)..(20): modified with phosphorothioate bond
  misc_feature (20)..(20): modified with two hexaethylene glycol spacers
  misc_feature (20)..(20): modified with 3'-cholesteryl with tetraethylene glycol
cagagtcctcggtagaactt

SEQ ID NO: 177 - DNA, 20 bp, Artificial Sequence
  Synthetic
  misc_feature (1)..(20): modified with phosphorothioate bond
  misc_feature (20)..(20): modified with two hexaethylene glycol spacers
  misc_feature (20)..(20): modified with 3'-cholesteryl with tetraethylene glycol
aagccgatagttagacagag

SEQ ID NO: 178 - DNA, 20 bp, Artificial Sequence
  Synthetic
  misc_feature (1)..(20): modified with phosphorothioate bond
  misc_feature (20)..(20): modified with two hexaethylene glycol spacers
  misc_feature (20)..(20): modified with 3'-cholesteryl with tetraethylene glycol
aaaaaaagactaggtaagcc

SEQ ID NO: 179 - DNA, 20 bp, Artificial Sequence
  Synthetic
  misc_feature (1)..(20): modified with phosphorothioate bond
  misc_feature (20)..(20): modified with two hexaethylene glycol spacers
  misc_feature (20)..(20): modified with 3'-cholesteryl with tetraethylene glycol
gttttgagagaggaggtaaa

SEQ ID NO: 180 - DNA, 20 bp, Artificial Sequence
  Synthetic
  misc_feature (1)..(20): modified with phosphorothioate bond
  misc_feature (20)..(20): modified with two hexaethylene glycol spacers
  misc_feature (20)..(20): modified with 3'-cholesteryl with tetraethylene glycol
gttttttctttgatggtttt

SEQ ID NO: 181 - DNA, 20 bp, Artificial Sequence
  Synthetic
  misc_feature (1)..(20): modified with phosphorothioate bond
  misc_feature (20)..(20): modified with two hexaethylene glycol spacers
  misc_feature (20)..(20): modified with 3'-cholesteryl with tetraethylene glycol
gaaatctaatttttcagttt

SEQ ID NO: 182 - DNA, 20 bp, Artificial Sequence
  Synthetic
  misc_feature (1)..(20): modified with phosphorothioate bond
  misc_feature (20)..(20): modified with two hexaethylene glycol spacers
  misc_feature (20)..(20): modified with 3'-cholesteryl with tetraethylene glycol
aatcttaattttgctgaaat

SEQ ID NO: 183 - DNA, 20 bp, Artificial Sequence
  Synthetic
  misc_feature (1)..(20): modified with phosphorothioate bond
  misc_feature (20)..(20): modified with two hexaethylene glycol spacers
  misc_feature (20)..(20): modified with 3'-cholesteryl with tetraethylene glycol
tttttaagaacagaaaatct

SEQ ID NO: 184 - DNA, 20 bp, Artificial Sequence
  Synthetic
  misc_feature (1)..(20): modified with phosphorothioate bond
  misc_feature (20)..(20): modified with two hexaethylene glycol spacers
  misc_feature (20)..(20): modified with 3'-cholesteryl with tetraethylene glycol
acactttggtttttcatttt

SEQ ID NO: 185 - DNA, 20 bp, Artificial Sequence
  Synthetic
  misc_feature (1)..(20): modified with phosphorothioate bond
  misc_feature (20)..(20): modified with two hexaethylene glycol spacers
  misc_feature (20)..(20): modified with 3'-cholesteryl with tetraethylene glycol
attttctcccggtttacact

SEQ ID NO: 186 - DNA, 20 bp, Artificial Sequence
  Synthetic
  misc_feature (1)..(20): modified with phosphorothioate bond
  misc_feature (20)..(20): modified with two hexaethylene glycol spacers
  misc_feature (20)..(20): modified with 3'-cholesteryl with tetraethylene glycol
aggtaacttgcatgtatttt

SEQ ID NO: 187 - DNA, 20 bp, Artificial Sequence
  Synthetic
  misc_feature (1)..(20): modified with phosphorothioate bond
  misc_feature (20)..(20): modified with two hexaethylene glycol spacers
  misc_feature (20)..(20): modified with 3'-cholesteryl with tetraethylene glycol
aatatctttatcagataggt

SEQ ID NO: 188 - DNA, 20 bp, Artificial Sequence
  Synthetic
  misc_feature (1)..(20): modified with phosphorothioate bond
  misc_feature (20)..(20): modified with two hexaethylene glycol spacers
  misc_feature (20)..(20): modified with 3'-cholesteryl with tetraethylene glycol
atgtttgctgggtacaatat

SEQ ID NO: 189 - DNA, 20 bp, Artificial Sequence
  Synthetic
  misc_feature (1)..(20): modified with phosphorothioate bond
  misc_feature (20)..(20): modified with two hexaethylene glycol spacers
  misc_feature (20)..(20): modified with 3'-cholesteryl with tetraethylene glycol
gtttgagagttcttcatgtt

SEQ ID NO: 190 - DNA, 20 bp, Artificial Sequence
  Synthetic
  misc_feature (1)..(20): modified with phosphorothioate bond
  misc_feature (20)..(20): modified with two hexaethylene glycol spacers
  misc_feature (20)..(20): modified with 3'-cholesteryl with tetraethylene glycol
catcttttaattgaattttt

SEQ ID NO: 191 - DNA, 20 bp, Artificial Sequence
  Synthetic
  misc_feature (1)..(20): modified with phosphorothioate bond
  misc_feature (20)..(20): modified with two hexaethylene glycol spacers
  misc_feature (20)..(20): modified with 3'-cholesteryl with tetraethylene glycol
cccggccaacttacccatct

SEQ ID NO: 192 - DNA, 20 bp, Artificial Sequence
  Synthetic
  misc_feature (1)..(20): modified with phosphorothioate bond
  misc_feature (20)..(20): modified with two hexaethylene glycol spacers
  misc_feature (20)..(20): modified with 3'-cholesteryl with tetraethylene glycol
gattgggattgcaagtatga

SEQ ID NO: 193 - DNA, 20 bp, Artificial Sequence
  Synthetic
  misc_feature (1)..(20): modified with phosphorothioate bond
  misc_feature (20)..(20): modified with two hexaethylene glycol spacers
  misc_feature (20)..(20): modified with 3'-cholesteryl with tetraethylene glycol
gagcacacgccacaatgcct

SEQ ID NO: 194 - DNA, 20 bp, Artificial Sequence
  Synthetic
  misc_feature (1)..(20): modified with phosphorothioate bond
  misc_feature (20)..(20): modified with two hexaethylene glycol spacers
  misc_feature (20)..(20): modified with 3'-cholesteryl with tetraethylene glycol
agtcttcttgtctcagcctt

SEQ ID NO: 195 - DNA, 20 bp, Artificial Sequence
  Synthetic
  misc_feature (1)..(20): modified with phosphorothioate bond
  misc_feature (20)..(20): modified with two hexaethylene glycol spacers
  misc_feature (20)..(20): modified with 3'-cholesteryl with tetraethylene glycol
ccacctcctgcgctcagtct

SEQ ID NO: 196 - DNA, 20 bp, Artificial Sequence
  Synthetic
  misc_feature (1)..(20): modified with phosphorothioate bond
  misc_feature (20)..(20): modified with two hexaethylene glycol spacers
  misc_feature (20)..(20): modified with 3'-cholesteryl with tetraethylene glycol
tcacacagcctactgcagcc

SEQ ID NO: 197 - DNA, 20 bp, Artificial Sequence
  Synthetic
  misc_feature (1)..(2): modified with phosphorothioate bond
  misc_feature (2)..(6): modified with phosphodiester bond
  misc_feature (6)..(16): modified with phosphorothioate bond
  misc_feature (16)..(18): modified with phosphodiester bond
  misc_feature (18)..(20): modified with phosphorothioate bond
  misc_feature (20)..(20): modified with two hexaethylene glycol spacers
  misc_feature (20)..(20): modified with 3'-cholesteryl with tetraethylene glycol
cagagtcctcggtagaactt

SEQ ID NO: 198 - DNA, 20 bp, Artificial Sequence
  Synthetic
  misc_feature (1)..(2): modified with phosphorothioate bond
  misc_feature (2)..(6): modified with phosphodiester bond
  misc_feature (6)..(16): modified with phosphorothioate bond
  misc_feature (16)..(18): modified with phosphodiester bond
  misc_feature (18)..(20): modified with phosphorothioate bond
  misc_feature (18)..(18): modified with two hexaethylene glycol spacers
  misc_feature (18)..(18): modified with 3'-cholesteryl with tetraethyene glycol
gaaatctaatttttcagttt

SEQ ID NO: 199 - DNA, 18 bp, Artificial Sequence
  Synthetic
  modified_base (1)..(7): modified with 2'-O-methylation
  misc_feature (8)..(14): modified with phosphorothioate bond
  modified_base (14)..(18): modified with 2'-O-methylation
  misc_feature (18)..(18): modified with two internal hexaethylene glycol spacers
  misc_feature (18)..(18): modified with 3'-cholesteryl with tetraethylene glycol
cccacaggggcatguagu

SEQ ID NO: 200 - DNA, 18 bp, Artificial Sequence
  Synthetic
  misc_feature (1)..(7): modified with 2'-O-methylation
  misc_feature (8)..(14): modified with phosphorothioate bond
  misc_feature (14)..(18): modified with 2'-O-methylation
cccacaggggcatguagu

SEQ ID NO: 201 - DNA, 18 bp, Artificial Sequence
  Synthetic
  misc_feature (1)..(18): modified with phosphorothioate bond
  modified_base (1)..(8): modified with 2'-O-(2-methoxyethyl)
  modified_base (9)..(9): modified with 5'-methyl C with 2'-O-(2-methoxyethyl)
  modified_base (10)..(11): modified with 2'-O-(2-methoxyethyl)
  modified_base (12)..(12): modified with 5'-methyl C with 2'-O-(2-methoxyethyl)
  modified_base (13)..(18): modified with 2'-O-(2-methoxyethyl)
  misc_feature (18)..(18): modified with two internal hexaethylene glycol spacers
  misc_feature (18)..(18): modified with 3'-cholesteryl with tetraethylene glycol
atggtaaacaacaatgag

SEQ ID NO: 202 - DNA, 18 bp, Artificial Sequence
  Synthetic
  misc_feature (1)..(18): modified with phosphorothioate bond
  misc_feature (1)..(8): modified with 2'-O-(2-methoxyethyl)
  misc_feature (9)..(9): modified with 5'-methyl C with 2'-O-(2-methoxyethyl)
  misc_feature (10)..(11): modified with 2'-O-(2-methoxyethyl)
  misc_feature (12)..(12): modified with 5'-methyl C with 2'-O-(2-methoxyethyl)
  misc_feature (13)..(18): modified with 2'-O-(2-methoxyethyl)
atggtaaacaacaatgag

SEQ ID NO: 203 - RNA, 21 nt, Artificial Sequence
  Synthetic
  misc_feature (1)..(21): modified with phosphorothioate bond
  modified_base (1)..(21): modified with 2'-O-(2-methoxyethyl)
  misc_feature (21)..(21): modified with two internal hexaethylene glycol spacers
  misc_feature (21)..(21): modified with 3'-cholesteryl with tetraethylene glycol
uuucaucuguuccaaaaugag

SEQ ID NO: 204 - RNA, 21 nt, Artificial Sequence
  Synthetic
  misc_feature (1)..(21): modified with phosphorothioate bond
  modified_base (1)..(21): modified with 2'-O-(2-methoxyethyl)
uuucaucuguuccaaaaugag

SEQ ID NO: 205 - DNA, 25 bp, Artificial Sequence
  Synthetic
  misc_feature (1)..(25): modified with phosphorothioate bond
  modified_base (1)..(1): modified with 2'-O-(2-methoxyethyl)
  modified_base (2)..(2): modified with 5'-methyl C with 2'-O-(2-methoxyethyl)
  modified_base (3)..(5): modified with 2'-O-(2-methoxyethyl)
  modified_base (6)..(6): modified with 5'-methyl C with 2'-O-(2-methoxyethyl)
  modified_base (7)..(7): modified with 2'-O-(2-methoxyethyl)
  modified_base (8)..(9): modified with 5'-methyl C with 2'-O-(2-methoxyethyl)
  modified_base (10)..(11): modified with 2'-O-(2-methoxyethyl)
  modified_base (12)..(12): modified with 5'-methyl C with 2'-O-(2-methoxyethyl)
  modified_base (13)..(15): modified with 2'-O-(2-methoxyethyl)
  modified_base (16)..(17): modified with 5'-methyl C with 2'-O-(2-methoxyethyl)
  modified_base (18)..(19): modified with 2'-O-(2-methoxyethyl)
  modified_base (20)..(21): modified with 5'-methyl C with 2'-O-(2-methoxyethyl)
  modified_base (22)..(25): modified with 2'-O-(2-methoxyethyl)
  misc_feature (25)..(25): modified with two internal hexaethylene glycol spacers
  misc_feature (25)..(25): modified with 3'-cholesteryl with tetraethylene glycol
gcagtcaccatcttaccaacctgaa

SEQ ID NO: 206 - DNA, 25 bp, Artificial Sequence
  Synthetic
  misc_feature (1)..(25): modified with phosphorothioate bond
  modified_base (1)..(1): modified with 2'-O-(2-methoxyethyl)
  modified_base (2)..(2): modified with 5'-methyl C with 2'-O-(2-methoxyethyl)
  modified_base (3)..(5): modified with 2'-O-(2-methoxyethyl)
  modified_base (6)..(6): modified with 5'-methyl C with 2'-O-(2-methoxyethyl)
  modified_base (7)..(7): modified with 2'-O-(2-methoxyethyl)
  modified_base (8)..(9): modified with 5'-methyl C with 2'-O-(2-methoxyethyl)
  modified_base (10)..(11): modified with 2'-O-(2-methoxyethyl)
  modified_base (12)..(12): modified with 5'-methyl C with 2'-O-(2-methoxyethyl)
  modified_base (13)..(15): modified with 2'-O-(2-methoxyethyl)
  modified_base (16)..(17): modified with 5'-methyl C with 2'-O-(2-methoxyethyl)
  modified_base (18)..(19): modified with 2'-O-(2-methoxyethyl)
  modified_base (20)..(21): modified with 5'-methyl C with 2'-O-(2-methoxyethyl)
  modified_base (22)..(25): modified with 2'-O-(2-methoxyethyl)
gcagtcaccatcttaccaacctgaa

SEQ ID NO: 207 - DNA, 23 bp, Artificial Sequence
  Synthetic
  misc_feature (1)..(23): modified with phosphorothioate bond
  modified_base (1)..(2): modified with 2'-O-(2-methoxyethyl)
  modified_base (3)..(3): modified with 5'-methyl C with 2'-O-(2-methoxyethyl)
  modified_base (4)..(4): modified with 2'-O-(2-methoxyethyl)
  modified_base (5)..(5): modified with 5'-methyl C with 2'-O-(2-methoxyethyl)
  modified_base (6)..(8): modified with 2'-O-(2-methoxyethyl)
  modified_base (9)..(10): modified with 5'-methyl C with 2'-O-(2-methoxyethyl)
  modified_base (11)..(11): modified with 2'-O-(2-methoxyethyl)
  modified_base (12)..(13): modified with 5'-methyl C with 2'-O-(2-methoxyethyl)
  modified_base (14)..(17): modified with 2'-O-(2-methoxyethyl)
  modified_base (18)..(18): modified with 5'-methyl C with 2'-O-(2-methoxyethyl)
  modified_base (19)..(19): modified with 2'-O-(2-methoxyethyl)
  modified_base (20)..(20): modified with 5'-methyl C with 2'-O-(2-methoxyethyl)
  modified_base (21)..(23): modified with 2'-O-(2-methoxyethyl)
  misc_feature (23)..(23): modified with two internal hexaethylene glycol spacers
  misc_feature (23)..(23): modified with 3'-cholesteryl with tetraethylene glycol
ttcacttgcctccttgactcttg

SEQ ID NO: 208 - DNA, 23 bp, Artificial Sequence
  Synthetic
  misc_feature (1)..(23): modified with phosphorothioate bond
  modified_base (1)..(2): modified with 2'-O-(2-methoxyethyl)
  modified_base (3)..(3): modified with 3'-cholesteryl with tetraethylene glycol
  modified_base (4)..(4): modified with 2'-O-(2-methoxyethyl)
  modified_base (5)..(5): modified with 3'-cholesteryl with tetraethylene glycol
  modified_base (6)..(8): modified with 2'-O-(2-methoxyethyl)
  modified_base (9)..(10): modified with 3'-cholesteryl with tetraethylene glycol
  modified_base (11)..(11): modified with 2'-O-(2-methoxyethyl)
  modified_base (12)..(13): modified with 3'-cholesteryl with tetraethylene glycol
  modified_base (14)..(17): modified with 2'-O-(2-methoxyethyl)
  modified_base (18)..(18): modified with 3'-cholesteryl with tetraethylene glycol
  modified_base (19)..(19): modified with 2'-O-(2-methoxyethyl)
  modified_base (20)..(20): modified with 3'-cholesteryl with tetraethylene glycol
  modified_base (21)..(23): modified with 2'-O-(2-methoxyethyl)
ttcacttgcctccttgactcttg

SEQ ID NO: 209 - RNA, 18 nt, Artificial Sequence
  Synthetic
  modified_base (1)..(6): modified with 2'-O-methylation
  misc_feature (7)..(13): modified with phosphorothioate bond
  modified_base (13)..(18): modified with 2'-O-methylation
  misc_feature (18)..(18): modified with two internal hexaethylene glycol spacers
  misc_feature (18)..(18): modified with 3'-cholesteryl with tetraethylene glycol
guuucaccacccaauucc

SEQ ID NO: 210 - DNA, 15 bp, Artificial Sequence
  Synthetic
  misc_feature (1)..(15): modified with phosphorothioate bond
  modified_base (1)..(5): modified with 2'-O-(2-methoxyethyl)
  modified_base (6)..(6): modified with 5'-methyl C with 2'-O-(2-methoxyethyl)
  modified_base (7)..(7): modified with 2'-O-(2-methoxyethyl)
  modified_base (8)..(8): modified with 5'-methyl C with 2'-O-(2-methoxyethyl)
  modified_base (9)..(15): modified with 2'-O-(2-methoxyethyl)
tgtatctcattgtag

SEQ ID NO: 211 - DNA, 18 bp, Artificial Sequence
  Synthetic
  modified_base (1)..(18): modified with 2'-O-methylation
  misc_feature (8)..(14): modified with phosphorothioate bond
  misc_feature (18)..(18): modified with two hexaethylene glycol spacers
  misc_feature (18)..(18): modified with 3'-cholesteryl with tetraethylene glycol
cccacaggggcatguagu

SEQ ID NO: 212 - RNA, 21 nt, Artificial Sequence
  Synthetic
uuucaucuguuccaaaaugag

SEQ ID NO: 213 - DNA, 25 bp, Artificial Sequence
  Synthetic
gcagtcaccatcttaccaacctgaa

SEQ ID NO: 214 - DNA, 23 bp, Artificial Sequence
  Synthetic
ttcacttgcctccttgactcttg

SEQ ID NO: 215 - DNA, 15 bp, Artificial Sequence
  Synthetic
tgtatctcattgtag

What is claimed is:

1. A spherical nucleic acid (SNA) for regulating pre-mRNA splicing, comprising
a core and an antisense oligonucleotide comprised of 8 to 50 linked nucleosides in length targeted to a region in a pre-mRNA of interest to regulate pre-mRNA splicing, and wherein the antisense oligonucleotide is attached to the core and forms an oligonucleotide shell.

2. The SNA of claim 1, wherein the pre-mRNA of interest is obtained from the genomic sequence of interleukin 17 receptor A (IL17RA), RE1 Silencing Transcription Factor (REST), IL1 receptor accessory protein (IL1RAP), or signal transducer and activator of transcription 3 (STAT3).

3. The SNA of any one of claims 1-2, wherein the core is a solid core or a hollow core.

4. The SNA of any one of claims 1-3, wherein the core is a liposomal core.

5. The SNA of any one of claims 1-4, wherein the core has a diameter of or about 5 nm to about 150 nm.

6. The SNA of any one of claims 1-5, wherein the core has a diameter of or about 5 nm, of or about 6 nm, of or about 7 nm, of or about 8 nm, of or about 9 nm, of or about 10 nm, of or about 11 nm, of or about 12 nm, of or about 13 nm, of or about 14 nm, of or about 15 nm, of or about 16 nm, of or about 17 nm, of or about 18 nm, of or about 19 nm, of or about 20 nm, of or about 21 nm, of or about 22 nm, of or about 23 nm, of or about 24 nm, of or about 25 nm, of or about 26 nm, of or about 27 nm, of or about 28 nm, of or about 29 nm, of or about 30 nm, of or about 31 nm, of or about 32 nm, of or about 33 nm, of or about 34 nm, of or about 35 nm, of or about 36 nm, of or about 37 nm, of or about 38 nm, of or about 39 nm, of or about 40 nm, of or about 41 nm, of or about 42 nm, of or about 43 nm, of or about 44 nm, of or about 45 nm, of or about 46 nm, of or about 47 nm, of or about 48 nm, of or about 49 nm, of or about 50 nm, of or about 55 nm, of or about 60 nm, of or about 65 nm, of or about 70 nm, of or about 75 nm, of or about 80 nm, of or about 85 nm, of or about 90 nm, of or about 95 nm, of or about 100 nm, of or about 110 nm, of or about 120 nm, of or about 130 nm, of or about 140 nm, of or about 150 nm, of or about 160 nm, of or about 170 nm, of or about 180 nm, of or about 190 nm, of or about 200 nm, of or about 210 nm, of or about 220 nm, of or about 230 nm, of or about 240 nm, of or about 250 nm, of or about 260 nm, of or about 270 nm, of or about 280 nm, of or about 290 nm, of or about 300 nm, of more than about 300 nm, of about 15 nm to about 100 nm, of about 20 nm to about 100 nm, of about 25 nm to about 100 nm, of about 15 nm to about 50 nm, of about 20 nm to about 50 nm, of about 10 nm to about 70 nm, of about 15 nm to about 70 nm, of about 20 nm to about 70 nm, of about 10 nm to about 30 nm, of about 15 nm to about 30 nm, of about 20 nm to about 30 nm, of about 10 nm to about 40 nm, of about 15 nm to about 40 nm, of about 20 nm to about 40 nm, of about 10 nm to about 80 nm, of about 15 nm to about 80 nm, or of about 20 nm to about 80 nm.

7. The SNA of any one of claims 1-5, wherein the SNA has a diameter of or about 5 nm, of or about 6 nm, of or about 7 nm, of or about 8 nm, of or about 9 nm, of or about 10 nm, of or about 11 nm, of or about 12 nm, of or about 13 nm, of or about 14 nm, of or about 15 nm, of or about 16 nm, of or about 17 nm, of or about 18 nm, of or about 19 nm, of or about 20 nm, of or about 21 nm, of or about 22 nm, of or about 23 nm, of or about 24 nm, of or about 25 nm, of or about 26 nm, of or about 27 nm, of or about 28 nm, of or about 29 nm, of or about 30 nm, of or about 31 nm, of or about 32 nm, of or about 33 nm, of or about 34 nm, of or about 35 nm, of or about 36 nm, of or about 37 nm, of or about 38 nm, of or about 39 nm, of or about 40 nm, of or about 41 nm, of or about 42 nm, of or about 43 nm, of or about 44 nm, of or about 45 nm, of or about 46 nm, of or about 47 nm, of or about 48 nm, of or about 49 nm, of or about 50 nm, of or about 55 nm, of or about 60 nm, of or about 65 nm, of or about 70 nm, of or about 75 nm, of or about 80 nm, of or about 85 nm, of or about 90 nm, of or about 95 nm, of or about 100 nm, of or about 110 nm, of or about 120 nm, of or about 130 nm, of or about 140 nm, of or about 150 nm, of or about 160 nm, of or about 170 nm, of or about 180 nm, of or about 190 nm, of or about 200 nm, of or about 210 nm, of or about 220 nm, of or about 230 nm, of or about 240 nm, of or about 250 nm, of or about 260 nm, of or about 270 nm, of or about 280 nm, of or about 290 nm, of or about 300 nm, of more than about 300 nm, of about 15 nm to about 100 nm, of about 20 nm to about 100 nm, of about 25 nm to about 100 nm, of about 15 nm to about 50 nm, of about 20 nm to about 50 nm, of about 10 nm to about 70 nm, of about 15 nm to about 70 nm, of about 20 nm to about 70 nm, of about 10 nm to about 30 nm, of about 15 nm to about 30 nm, of about 20 nm to about 30 nm, of about 10 nm to about 40 nm, of about 15 nm to about 40 nm, of about 20 nm to about 40 nm, of about 10 nm to about 80 nm, of about 15 nm to about 80 nm, or of about 20 nm to about 80 nm.

8. The SNA of any one of claims 1-7, wherein the region is a regulatory site or a site at which a splicing factor interacts.

9. The SNA of any one of claims 4-8, wherein the liposomal core comprises a lipid bilayer and the antisense oligonucleotide is attached to the lipid bilayer.

10. The SNA of any one of claims 1-9, wherein the antisense oligonucleotide is eight to 100 linked nucleosides in length, eight linked nucleosides in length, nine linked nucleosides in length, 10 linked nucleosides in length, 11 linked nucleosides in length, 12 linked nucleosides in length, 13 linked nucleosides in length, 14 linked nucleosides in length, 15 linked nucleosides in length, 16 linked nucleosides in length, 17 linked nucleosides in length, 18 linked nucleosides in length, 19 linked nucleosides in length, 20 linked nucleosides in length, 21 linked nucleosides in length, 22 linked nucleosides in length, 23 linked nucleosides in length, 24 linked nucleosides in length, 25 linked nucleosides in length, 26 linked nucleosides in length, 27 linked nucleosides in length, 28 linked nucleosides in length, 29 linked nucleosides in length, 30 linked nucleosides in length, 31 linked nucleosides in length, 32 linked nucleosides in length, 33 linked nucleosides in length, 34 linked nucleosides in length, 35 linked nucleosides in length, 36 linked nucleosides in length, 37 linked nucleosides in length, 38 linked nucleosides in length, 39 linked nucleosides in length, 40 linked nucleosides in length, 41 linked nucleosides in length, 42 linked nucleosides in length, 43 linked nucleosides in length, 44 linked nucleosides in length, 45 linked nucleosides in length, 46 linked nucleosides in length, 47 linked nucleosides in length, 49 linked nucleosides in length, 50 linked nucleosides in length, 52 linked nucleosides in length, 54 linked nucleosides in length, 56 linked nucleosides in length, 58 linked nucleosides in length, 60 linked nucleosides in length, 62 linked nucleosides in length, 64 linked nucleosides in length, 66 linked nucleosides in length, 68 linked nucleosides in length, 70 linked nucleosides in length, 72 linked nucleosides in length, 74 linked nucleosides in length, 76 linked nucleosides in length, 78 linked nucleosides in length, 80 linked nucleosides in length, 82 linked nucleosides in length, 84 linked nucleosides in length, 86 linked nucleosides in length, 88 linked nucleosides in length, 90 linked nucleosides in length, 92 linked nucleosides in length, 94 linked nucleosides in length, 96 linked nucleosides in length, 100 linked nucleosides in length, or any range or combination thereof.

11. The SNA of any one of claims 1-10, wherein less than all of the internucleoside linkages in the antisense oligonucleotide are phosphodiester linkages.

12. The SNA of any one of claims 1-10, wherein all of the internucleoside linkages in the antisense oligonucleotide are phosphodiester linkages.

13. The SNA of any one of claims 1-11, wherein 1%, 2%, 3%, 4%, 5%, 6%, 7%, 8%, 9%, 10%, 11%, 12%, 13%, 14%, 15%, 16%, 17%, 18%, 19%, 20%, 25%, 30%, 35%, 40%, 45%, 50%, 55%, 60%, 65%, 70%, 75%, 80%, 85%, 90%, 95%, or 99% of the internucleoside linkages in the antisense oligonucleotide are phosphodiester linkages.

14. The SNA of any one of claims 1-11 or 13, wherein the antisense oligonucleotide has phosphorothioate internucleoside linkages.

15. The SNA of claim 14, wherein less than all of the internucleoside linkages in the antisense oligonucleotide are phosphorothioate linkages.

16. The SNA of claim 14, wherein all of the internucleoside linkages in the antisense oligonucleotide are phosphorothioate linkages.

17. The SNA of any one of claims 14-16, wherein 1%, 2%, 3%, 4%, 5%, 6%, 7%, 8%, 9%, 10%, 11%, 12%, 13%, 14%, 15%, 16%, 17%, 18%, 19%, 20%, 25%, 30%, 35%, 40%, 45%, 50%, 55%, 60%, 65%, 70%, 75%, 80%, 85%, 90%, 95%, or 99% of the internucleoside linkages in the antisense oligonucleotide are phosphorothioate linkages.

18. The SNA of any one of claims 1-17, wherein the antisense oligonucleotide has 2′O methyl or 2′ O methoxyethyl modifications.

19. The SNA of claim 18, wherein less than all of the nucleotides in the antisense oligonucleotide include a 2′O methyl or 2′ O methoxyethyl modification.

20. The SNA of claim 18, wherein all of the nucleotides in the antisense oligonucleotide include a 2′O methyl or 2′ O methoxyethyl modification.

21. The SNA of claim 18 or 19, wherein 1%, 2%, 3%, 4%, 5%, 6%, 7%, 8%, 9%, 10%, 11%, 12%, 13%, 14%, 15%, 16%, 17%, 18%, 19%, 20%, 25%, 30%, 35%, 40%, 45%, 50%, 55%, 60%, 65%, 70%, 75%, 80%, 85%, 90%, 95%, or 99% of the nucleotides in the antisense oligonucleotide include a 2′O methyl modification.

22. The SNA of any one of claims 1-21, wherein the antisense oligonucleotide is comprised of 18 to 21 linked nucleosides in length.

23. The SNA of any one of claims 4-22, wherein the antisense oligonucleotides of the oligonucleotide shell are directly attached to the lipid bilayer of the liposomal core.

24. The SNA of any one of claims 4-22, wherein the antisense oligonucleotides of the oligonucleotide shell are indirectly attached to the lipid bilayer of the liposomal core through a linker moiety.

25. The SNA of claim 24, wherein the linker moiety comprises a molecular species at the 3′ or 5′ terminus of the antisense oligonucleotide, wherein the molecular species is positioned in the liposomal core and the antisense oligonucleotide extends radially from the liposomal core.

26. The SNA of claim 25, wherein the molecular species is at the 5′ terminus of the antisense oligonucleotide.

27. The SNA of any one of claims 24-26, wherein the molecular species is attached to the linker moiety.

28. The SNA of any one of claims 13-27, wherein the molecular species is a hydrophobic group.

29. The SNA of claim 28, wherein the hydrophobic group is selected from the group consisting of cholesterol, a cholesteryl or modified cholesteryl residue, tocopherol, adamantine, dihydrotesterone, long chain alkyl, long chain alkenyl, long chain alkynyl, olely-lithocholic, cholenic, oleoyl-cholenic, decane, dodecane, docosahexaenoyl, palmityl, C6-palmityl, heptadecyl, myrisityl, arachidyl, stearyl, behenyl, linoleyl, bile acids, cholic acid or taurocholic acid, deoxycholate, oleyl litocholic acid, oleoyl cholenic acid, glycolipids, phospholipids, sphingolipids, isoprenoids, such as steroids, vitamins, such as vitamin E, fatty acids either saturated or unsaturated, fatty acid esters, such as triglycerides, pyrenes, porphyrines, Texaphyrine, adamantane, acridines, biotin, coumarin, fluorescein, rhodamine, Texas-Red, digoxygenin, dimethoxytrityl, t-butyldimethylsilyl, t-butyldiphenylsilyl, cyanine dyes (e.g. Cy3 or Cy5), Hoechst 33258 dye, psoralen, or ibuprofen.

30. The SNA of claim 28, wherein the hydrophobic group is cholesterol.

31. The SNA of any one of claims 24-30, wherein the linker moiety comprises a non-nucleotidic linker moiety attached to the molecular species.

32. The SNA of claim 31, wherein the non-nucleotidic linker moiety is selected from the group consisting of an abasic residue (dSpacer), oligoethyleneglycol, triethyleneglycol, hexaethylenegylcol, alkane-diol, or butanediol.

33. The SNA of claim 31, wherein the non-nucleotidic linker moiety is a double linker.

34. The SNA of claim 33, wherein the double linker is two oligoethyleneglycols.

35. The SNA of claim 34, wherein the two oligoethyleneglycols are triethyleneglycol.

36. The SNA of claim 34, wherein the two oligoethyleneglycols are hexaethylenegylcol.

37. The SNA of claim 33, wherein the double linker is two alkane-diols.

38. The SNA of claim 37, wherein the two alkane-diols are butanediol.

39. The SNA of any one of claims 33-38, wherein the double linker is linked in the center by a phosphodiester, phosphorothioate, methylphosphonate, or amide linkage.

40. The SNA of claim 31, wherein the non-nucleotidic linker moiety is a triple linker.

41. The SNA of claim 40, wherein the triple linker is three oligoethyleneglycols.

42. The SNA of claim 41, wherein the three oligoethyleneglycols are triethyleneglycol.

43. The SNA of claim 41, wherein the three oligoethyleneglycols are hexaethylenegylcol.

44. The SNA of claim 40, wherein the triple linker is three alkane-diols.

45. The SNA of claim 44, wherein the three alkane-diols are butanediol.

46. The SNA of any one of claims 40-45, wherein the triple linker is linked in between each single linker by a phosphodiester, phosphorothioate, methylphosphonate, or amide linkage.

47. The SNA of any one of claims 1-46, wherein the antisense oligonucleotides comprise the entire SNA such that no other structural components are part of the SNA and wherein the antisense oligonucleotide includes a molecular species and non-nucleotidic linker moiety that form the core, with the oligonucleotides extending radially from the core.

48. The SNA of any one of claims 1-47, wherein the SNA is free of lipids, polymers or solid cores.

49. A spherical nucleic acid (SNA), comprising a core and a first antisense oligonucleotide comprised of 8 to 50 linked nucleosides in length targeted to a first region in a pre-mRNA of interest and a second antisense oligonucleotide comprised of 8 to 50 linked nucleosides in length targeted to second region in a pre-mRNA of interest to regulate pre-mRNA splicing, and wherein the antisense oligonucleotides are attached to the core and form an oligonucleotide shell.

50. The SNA of claim 49, wherein the first region in the pre-mRNA of interest is a regulatory site.

51. The SNA of claim 49 or 50, wherein the second region in the pre-mRNA of interest is a long non-coding RNA (lncRNA).

52. The SNA of any one of claims 1-51, wherein the oligonucleotide shell has a surface density of 5-1,000 oligonucleotides per SNA.

53. The SNA of any one of claims 1-51, wherein the oligonucleotide shell has a surface density of 100-1,000 oligonucleotides per SNA.

54. The SNA of any one of claims 1-51, wherein the oligonucleotide shell has a surface density of 500-1,000 oligonucleotides per SNA.

55. The SNA of any one of claims 1-51, wherein the oligonucleotide shell has a surface density of at least 5, 10, 15, 20, 21, 22, 23, 24, 25, 26, 27, 28, 29, 30, 31, 32, 33, 34, 35, 36, 37, 38, 39, 40, 41, 42, 43, 44, 45, 46, 47, 48, 49, 50, 60, 70, 80, 90 or 100 oligonucleotides per SNA.

56. The SNA of any one of claims 1-51, wherein the oligonucleotide shell has a surface density of about 5, 10, 15, 20, 21, 22, 23, 24, 25, 26, 27, 28, 29, 30, 31, 32, 33, 34, 35, 36, 37, 38, 39, 40, 41, 42, 43, 44, 45, 46, 47, 48, 49, 50, 60, 70, 80, 90 or 100 oligonucleotides per SNA.

57. The SNA of any one of claims 1-56, wherein the lipid bilayer comprises one or more lipids selected from the group consisting of: sphingolipids, ceramides, phospholipids, and sterols of different lengths, saturation states, and derivatives thereof.

58. The SNA of any one of claims 1-56, wherein the lipid bilayer comprises one or more lipids selected from the group consisting of: sphingosine, sphingosine phosphate, methylated sphingosine, methylated sphinganine, ceramide phosphate, 1-0 acyl ceramide, dihydroceramide, 2-hydroxy ceramide, sphingomyelin, glycosylated sphingolipid, sulfatide, ganglioside, phosphosphingolipid, phytosphingosine, phosphatidylcholine, lysophosphatidylcholine, phosphatidic acid, lysophosphatidic acid, cyclic LPA, phosphatidylethanolamine, lysophosphatidylethanolamine, phosphatidylglycerol, lysophosphatidylglycerol, phosphatidylserine, lysophosphatidylserine, phosphatidylinositol, inositol phosphate, LPI, cardiolipin, lysocardiolipin, bis(monoacylglycero) phosphate, (diacylglycero) phosphate, ether lipid, diphytanyl ether lipid, plasmalogen, cholesterol, desmosterol, stigmasterol, lanosterol, lathosterol, diosgenin, sitosterol, zymosterol, zymostenol, 14-demethyl-lanosterol, cholesterol sulfate, DHEA, DHEA sulfate, 14-demethyl-14-dehydrlanosterol, sitostanol, campesterol, ether anionic lipid, ether cationic lipid, lanthanide chelating lipid, A-ring substituted oxysterol, B-ring substituted oxysterol, D-ring substituted oxysterol, side-chain substituted oxysterol, double substituted oxysterol, cholestanoic acid derivative, fluorinated sterol, fluorescent sterol, sulfonated sterol, phosphorylated sterol, and polyunsaturated sterol of different lengths, saturation states, and derivatives thereof.

59. The SNA of any one of claims 1-56, wherein the lipid bilayer is comprised of 1,2-dioleoyl-sn-glycero-3-phosphocholine (DOPC).

60. A spherical nucleic acid (SNA), comprising a core and a first antisense oligonucleotide comprised of 8 to 50 linked nucleosides in length targeted to a regulatory site and a second antisense oligonucleotide comprised of 8 to 50 linked nucleosides in length targeted to a region of a lncRNA, and wherein the antisense oligonucleotides are attached to the core and form an oligonucleotide shell.

61. A spherical nucleic acid (SNA) comprising a core and antisense oligonucleotides arranged in an oligonucleotide shell, wherein the oligonucleotides comprise a nucleotide backbone comprising a modification in one or more of the carbons in the five-carbon sugar, and wherein five nucleotides or fewer than five nucleotides do not comprise a modification in the five-carbon sugar.

62. The SNA of claim 61, wherein four nucleotides or fewer than four nucleotides do not comprise a modification in the five-carbon sugar.

63. The SNA of claim 61, wherein three nucleotides or fewer than three nucleotides do not comprise a modification in the five-carbon sugar.

64. The SNA of claim 61, wherein two nucleotides or fewer than two nucleotides do not comprise a modification in the five-carbon sugar.

65. The SNA of claim 61, wherein one nucleotide does not comprise a modification in the five-carbon sugar.

66. The SNA of claim 61, wherein all of the nucleotides in the nucleotide backbone of the antisense oligonucleotides comprise a modification in one or more of the carbons in the five-carbon sugar.

67. The SNA of any one of claims 61-66, wherein the modification is at the 2′-carbon of the five-carbon sugar.

68. The SNA of any one of claims 61-67, wherein the modification is a 2′-O-methylated nucleotide.

69. The SNA of any one of claims 61-68, wherein the antisense oligonucleotide comprises the nucleic acid sequence CCCACAGGGGCATGUAGLU (SEQ ID NO: 58).

70. The SNA of any one of claims 61-69, wherein the antisense oligonucleotide comprises or consists of the nucleic acid sequence mCmCmCmAmCmAmGmG*mG*mG*mC*mA*mT*mGmUmAmGmU (SEQ ID NO: 59), wherein * is a phosphorothioate linkage and m is a 2′-O-methylated nucleotide.

71. The SNA of any one of claims 61-70, wherein the antisense oligonucleotide comprises the nucleic acid sequence mCmCmCmAmCmAmGmG*mG*mG*mC*mA*mT*mGmUmAmGmU/Spacer18/Spacer18/3 CholTEG (SEQ ID NO: 211), wherein * is a phosphorothioate linkage, m is a 2′-O-methylated nucleotide, Spacer18 is a hexa(ethylene glycol) spacer, and 3CholTEG is tri(ethylene glycol) bound to a cholesterol.

72. A spherical nucleic acid (SNA), comprising an antisense oligonucleotide comprised of 8 to 50 linked nucleosides in length targeted to a regulatory site of a pre-mRNA of interest and a linker moiety comprising a molecular species at the 3′-end or the 5′-end of the antisense oligonucleotide, wherein the molecular species is a hydrophobic group comprising a stearyl.

73. The SNA of claim 72, wherein the stearyl is a distearyl.

74. A spherical nucleic acid (SNA) for regulating pre-mRNA splicing, comprising
a core and an antisense oligonucleotide comprised of 8 to 50 linked nucleosides in length targeted to a regulator of splicing of a pre-mRNA of interest to regulate pre-mRNA splicing, and wherein the antisense oligonucleotide is attached to the core and forms an oligonucleotide shell.

75. The SNA of claim 74, wherein the regulator regulates the inclusion of exons and/or introns in a mRNA of interest.

76. The SNA of claim 74, wherein the regulator is an RNA binding protein, a splicing factor or a ribonucleoprotein.

77. A composition comprising:
a SNA in a pharmaceutically acceptable carrier, wherein the SNA is a SNA of any one of claims 1-76.

78. A composition comprising:
a first spherical nucleic acid (SNA) comprising a core and a first antisense oligonucleotide comprised of 10 to 40 linked nucleosides in length targeted to a first region in a pre-mRNA of interest, and a second SNA comprising a core and a second antisense oligonucleotide comprised of 10 to 40 linked nucleosides in length targeted to a second region in the pre-mRNA of interest.

79. A method for treating a subject having a disease or disorder related to an abnormality in splice modulation, comprising
administering to a subject having the disease or disorder related to an abnormality in splice modulation a spherical nucleic acid (SNA) in an effective amount to increase expression levels of a protein of interest over a baseline level in the subject in order to treat the disease or disorder related to an abnormality in splice modulation.

80. The method of claim 79, wherein the disease or disorder related to an abnormality in splice modulation is Stargardt Disease (Juvenile Macular Degeneration), Usher Syndrome, X-Linked Retinoschisis, macular corneal dystrophy, Congenital stromal corneal dystrophy, Congenital hereditary endothelial corneal dystrophy, Fleck corneal dystrophy, lattice corneal dystrophy type I, lattice corneal dystrophy type 11, granular corneal dystrophy type 1, granular corneal dystrophy type II (Avellino), Epithelial recurrent erosion dystrophy, Stocker-Holt corneal dystrophy, Duchennes Muscular Dystrophy, Leber Congenital Amaurosis, B-Thalassemia, Meesmann Endothelial Corneal Dystrophy, Menkes Disease, Nijmegen Breakage Syndrome, Hutchison-Gilford Progeria Syndrome, Gelatinous droplike corneal dystrophy, Reis-Buckler corneal dystrophy, Schnyder crystalline corneal dystrophy, Subepithelial mucinous corneal dystrophy, Lisch corneal dystrophy, Posterior amorphous corneal dystrophy, X-linked endothelial corneal dystrophy, Thiel-Behnke corneal dystrophy, Posterior polymorphous corneal dystrophy, Pompe, Familial Hypertrophic Cardiomyopathy, X-Linked Aggamaglobulinemia, Oculopharyngeal Muscular Dystrophy, Dilated Cardiomyopathy, Frontotemporal Dementia, epithelial basement membrane corneal dystrophy, Alzheimer's Disease, Familial Hypercholesterolemia, a pro-inflammatory disease, Huntington's disease, Fukuyama congenital muscular dystrophy, Myotonic Dystrophy Type I or II, Cancer, Neovascularization, Ataxia telangiectasia, Congenital disorder of glycosylation, FTD/Parkinsonism linked to chr17, Niemann Pick disease type C, Neurofibromatosis type 1, Neurofibromatosis type 2, Megalencephalic leukoencephalopathy with subcortical cysts type 1, Pelizaeus-Merzbacher disease, Spinocerebellar Ataxia Type 7, Spinocerebellar Ataxia Type 17, Huntington's disease, Spinocerebellar Ataxia Type 1, Spinocerebellar Ataxia Type 12, Spinal and bulbar muscular atrophy, Spinocerebellar Ataxia Type 2, Spinocerebellar Ataxia Type 6, Dentatorubral-pallidoluysian atrophy, Spinocerebellar Ataxia Type 3, Spinocerebellar Ataxia Type 8, Huntington disease-like-2, Myotonic Dystrophy Type I, Fuchs Endothelial Corneal Dystrophy, Fragile X syndrome, fragile X-associated tremor/ataxia syndrome, Fragile XE syndrome, Friedreich ataxia, Myotonic Dystrophy Type II, Spinocerebellar Ataxia Type 10, Spinocerebellar Ataxia Type 31, Spinocerebellar Ataxia Type 36, C9orf72-ALS/FTD, or Prader-Willi syndrome.

81. The method of claim 79, wherein the disease or disorder related to an abnormality in splice modulation is Duchennes Muscular Dystrophy, Leber Congenital Amaurosis, B-Thalassemia, a pro-inflammatory disease, Huntington's disease, Spinocerebellar Ataxia Type 7, Spinocerebellar Ataxia Type 17, Huntington's disease, Spinocerebellar Ataxia Type 1, Huntington disease-like-2, or Prader-Willi syndrome.

82. The method of any one of claims 79-81, wherein the baseline level is the level of the protein of interest in the subject prior to treatment with the SNA.

83. The method of claim 82, wherein the baseline level is the level of the protein of interest in a subject having the disease or disorder related to an abnormality in splice modulation and treated with a linear antisense oligonucleotide targeted to a region in a pre-mRNA of interest to regulate pre-mRNA splicing.

84. The method of any one of claims 79-83, wherein the SNA is delivered by a route of administration selected from the group consisting of intrathecal, oral, nasal, sublingual, intravenous, subcutaneous, mucosal, respiratory, direct injection, and dermal route of administration.

85. The method of any one of claims 79-84, wherein the SNA is a SNA of any one of claims 1-76.

86. A method for treating a subject having a disease or disorder related to an abnormality in splice modulation, comprising
administering to a subject having a disease or disorder related to an abnormality in splice modulation at least two doses of a spherical nucleic acid (SNA), in an effective amount to increase expression levels of a protein of interest or corrected mRNA over a baseline level in the subject in order to treat the disease or disorder related to an abnormality in splice modulation, wherein the second dose is administered about 3 months to 2 years after the first dose, and wherein the SNA comprises a core and an antisense oligonucleotide comprised of 8 to 50 linked nucleosides in length targeted to a region in a pre-mRNA of interest, such that a level of a protein of interest or a level of a corrected mRNA relative to a defective mRNA associated with the disease or disorder related to an abnormality in splice modulation in the subject is enhanced,
wherein the oligonucleotides are attached to the core and thus form an oligonucleotide shell, and
wherein the corrected mRNA produces a functional protein of interest to treat the subject having the disease or disorder related to an abnormality in splice modulation.

87. The SNA of claim 86, wherein the region is a regulatory region.

88. The method of claim 86, wherein the disease or disorder related to an abnormality in splice modulation is Stargardt Disease (Juvenile Macular Degeneration), Usher Syndrome, X-Linked Retinoschisis, macular corneal dystrophy, Congenital stromal corneal dystrophy, Congenital hereditary endothelial corneal dystrophy, Fleck corneal dystrophy, lattice corneal dystrophy type 1, lattice corneal dystrophy type II, granular corneal dystrophy type I, granular corneal dystrophy type II (Avellino), Epithelial recurrent erosion dystrophy, Stocker-Holt corneal dystrophy, Duchennes Muscular Dystrophy, Leber Congenital Amaurosis, B-Thalassemia, Meesmann Endothelial Corneal Dystrophy, Menkes Disease, Nijmegen Breakage Syndrome, Hutchison-Gilford Progeria Syndrome, Gelatinous droplike corneal dystrophy, Reis-Buckler corneal dystrophy, Schnyder crystalline corneal dystrophy, Subepithelial mucinous corneal dystrophy, Lisch corneal dystrophy, Posterior amorphous corneal dystrophy, X-linked endothelial corneal dystrophy, Thiel-Behnke corneal dystrophy, Posterior polymorphous corneal dystrophy, Pompe, Familial Hypertrophic Cardiomyopathy, X-Linked Aggamaglobulinemia, Oculopharyngeal Muscular Dystrophy, Dilated Cardiomyopathy, Frontotemporal Dementia, epithelial basement membrane corneal dystrophy, Alzheimer's Disease, Familial Hypercholesterolemia, a pro-inflammatory disease, Huntington's disease, Fukuyama congenital muscular dystrophy, Myotonic Dystrophy Type I or II, Cancer, Neovascularization, Ataxia telangiectasia, Congenital disorder of glycosylation, FTD/Parkinsonism linked to chr17, Niemann Pick disease type C, Neurofibromatosis type 1, Neurofibromatosis type 2, Megalencephalic leukoencephalopathy with subcortical cysts type 1, Pelizaeus-Merzbacher disease, Spinocerebellar Ataxia Type 7, Spinocerebellar Ataxia Type 17, Huntington's disease, Spinocerebellar Ataxia Type 1, Spinocerebellar Ataxia Type 12, Spinal and bulbar muscular atrophy, Spinocerebellar Ataxia Type 2, Spinocerebellar Ataxia Type 6, Dentatorubral-pallidoluysian atrophy, Spinocerebellar Ataxia Type 3, Spinocerebellar Ataxia Type 8, Huntington disease-like-2, Myotonic Dystrophy Type I, Fuchs Endothelial Corneal Dystrophy, Fragile X syndrome, fragile X-associated tremor/ataxia syndrome, Fragile XE syndrome, Friedreich ataxia, Myotonic Dystrophy Type II, Spinocerebellar Ataxia Type 10, Spinocerebellar Ataxia Type 31, Spinocerebellar Ataxia Type 36, C9orf72-ALS/FTD, or Prader-Willi syndrome.

89. The method of claim 86, wherein the disease or disorder related to an abnormality in splice modulation is Duchennes Muscular Dystrophy, Leber Congenital Amaurosis, B-Thalassemia, a pro-inflammatory disease, Huntington's disease, Spinocerebellar Ataxia Type 7, Spinocerebellar Ataxia Type 17, Huntington's disease, Spinocerebellar Ataxia Type 1, Huntington disease-like-2, or Prader-Willi syndrome.

90. A method of enhancing a level of a corrected mRNA relative to a defective mRNA associated with an abnormality in splice modulation in a cell, comprising contacting the cell with an spherical nucleic acid (SNA) comprising a core and an antisense oligonucleotide comprised of 10 to 40 linked nucleosides in length targeted to a region in a pre-mRNA of interest, such that the level of a corrected mRNA relative to a defective mRNA in the cell is enhanced.

91. The method of claim 90, wherein the SNA is a SNA of any one of claims 1-76.

92. A method for treating a subject having a disease or disorder related to an abnormality in splice modulation, comprising
administering to a subject having the disease or disorder related to an abnormality in splice modulation a spherical nucleic acid (SNA) in an effective amount to decrease expression levels of a protein of interest under a baseline level in the subject in order to treat the disease or disorder related to an abnormality in splice modulation.

93. The method of claim 92, wherein the SNA is a SNA of any one of claims 1-76.

94. The method of claim 92 or 93, wherein the antisense oligonucleotide has locked nucleic acid (LNA) modifications.

95. The method of claim 94, wherein less than all of the nucleotides in the antisense oligonucleotide include a LNA modification.

96. The method of claim 94, wherein all of the nucleotides in the antisense oligonucleotide include a LNA modification.

97. The method of claim 92 or 93, wherein the antisense oligonucleotide has morpholino modifications.

98. The method of claim 103, wherein less than all of the nucleotides in the antisense oligonucleotide include a morpholino modification.

99. The method of claim 103, wherein all of the nucleotides in the antisense oligonucleotide include a morpholino modification.

100. A method of producing a splice variant susceptible to nonsense-mediated decay, the method comprising:
contacting a cell with a spherical nucleic acid (SNA) comprising oligonucleotides arranged in an oligonucleotide shell and a core in an affective amount to produce a splice variant susceptible to nonsense-mediated decay.

101. A method of treating a disease or disorder in a subject, the method comprising:
administering to a subject an effective amount of a spherical nucleic acid (SNA) comprising oligonucleotides arranged in an oligonucleotide shell and a core to produce a splice variant susceptible to nonsense-mediated decay in order to treat the disease or disorder in the subject.

102. The method of claim 101, wherein the SNA is administered to the subject by an administration route selected from the group consisting of intrathecal, oral, nasal, sublingual, intravenous, subcutaneous, mucosal, respiratory, direct injection, and dermal route of administration.

103. The method of any one of claims 100-102, wherein the SNA is a SNA of any one of claims 1-76.

104. The method of any one of claims 101-103, wherein the disease or disorder is cancer.

105. The method of claim 104, wherein the cancer is selected from the group consisting of melanoma, renal cancer, clear cell carcinoma, prostate cancer, hormone refractory prostate adenocarcinoma, breast cancer, colon cancer, lung cancer, non-small cell lung cancer, small cell lung cancer, bone cancer, pancreatic cancer, pancreatic adenocarcinoma, skin cancer, cancer of the head or neck, cutaneous or intraocular malignant melanoma, uterine cancer, ovarian cancer, rectal cancer, stomach cancer, testicular cancer, thyroid cancer, anaplastic thyroid cancer, uterine cancer, carcinoma of the fallopian tubes, carcinoma of the endometrium, carcinoma of the cervix, Hodgkin's Disease, non-Hodgkin's lymphoma, cancer of the esophagus, cancer of the small intestine, cancer of the endocrine system, cancer of the thyroid gland, cancer of the parathyroid gland, cancer of the adrenal gland, sarcoma of soft tissue, cancer of the urethra, chronic or acute leukemias including acute myeloid leukemia, chronic myeloid leukemia, acute lymphoblastic leukemia, chronic lymphocytic leukemia, solid tumors of childhood, lymphocytic lymphoma, cancer of the bladder, cancer of the kidney or ureter, carcinoma of the renal pelvis, neoplasm of the central nervous system (CNS), primary CNS lymphoma, tumor angiogenesis, spinal axis tumor, brain stem glioma, pituitary adenoma, Kaposi's sarcoma, epidermoid cancer, squamous cell cancer, T-cell lymphoma, biliary tract cancer, brain cancer, breast cancer, cervical cancer, choriocarcinoma, esophageal cancer, gastric cancer, an intraepithelial neoplasm, lymphoma, liver cancer, neuroblastoma, oral cancer, sarcoma, hairy cell leukemia, chronic myelogenous leukemia, cutaneous T-cell leukemia, multiple myeloma, renal cell carcinoma, lymphoma, bladder cancer, glioblastoma multiforme, Merkel cell carcinoma, cutaneous squamous cell carcinoma, melanoma or squamous cell carcinoma of the head and neck,

106. The method of claim 104, wherein the cancer is selected from the group consisting of pleomorphic sarcoma, gastrointestinal stromal tumor (GIST), liposarcoma, leiomyosarcoma, synovial sarcoma, malignant peripheral nerve sheath tumor, rhabdomyosarcoma, angiosarcoma, fibrosarcoma, dermatofibrosarcoma protuberans, epithelioid sarcoma, myxoma, mesenchymoma, vascular sarcoma, neurilemmoma, bone sarcoma, osteosarcoma, Ewing's sarcoma, chondrosarcoma, Kaposi sarcoma, solitary fibrous tumor, chordoma, desmoid-type fibromatosis, fibroblastic sarcoma, giant cell tumor of the bone, gynaecological sarcoma, soft tissue sarcoma, angioleiomyoma, leiomyoma, smooth muscle sarcoma, fibrohistiocytic sarcoma, sebaceous cell carcinoma and eccrine carcinoma.

107. The method of any one of claims 101-103, wherein the disease or disorder is an inflammatory disease or disorder.

108. The method of claim 107, wherein the inflammatory disease or disorder is selected from the group consisting of an autoimmune disease, an infectious disease, transplant rejection or graft-versus-host disease, a pulmonary disorder, an intestinal disorder, a cardiac disorder, sepsis, a spondyloarthropathy, a metabolic disorder, a hepatic disorder, a skin disorder and a nail disorder.

109. The method of claim 107, wherein the inflammatory disease or disorder is selected from the group consisting of atopic dermatitis, epidermolysis bullosa, uveitis, gout, polymyalgia rheumatica, osteoarthritis, systemic-onset juvenile idiopathic arthritis, schnitzler syndrome, familial mediterranean fever, cryopyrin-associated periodic syndrome (CAPS), hyper-igd syndrome (HIDS), TNF receptor-associated periodic syndrome (TRAPs), type 2 diabetes, proliferative diabetic retinopathy, wet age-related macular degeneration, chronic obstructive pulmonary disease, type I diabetes, pyoderma gangrenosum, dry eye syndrome, and acne vulgaris, rheumatoid arthritis, psoriasis, psoriatic arthritis, psoriasis in combination with psoriatic arthritis, ulcerative colitis, Crohn's disease, vasculitis, Behcet's disease, ankylosing spondylitis, asthma, chronic obstructive pulmonary disorder (COPD), idiopathic pulmonary fibrosis (IPF), restenosis, anemia, pain and hepatitis C virus infection.

110. The method of claim 108, wherein the autoimmune disease is selected from the group consisting of rheumatoid arthritis, rheumatoid spondylitis, osteoarthritis, gouty arthritis, allergy, multiple sclerosis, autoimmune uveitis, and nephritic syndrome.

111. A method of increasing the levels of a soluble variant of a transmembrane receptor in a cell, the method comprising:
contacting a cell with an effective amount of a spherical nucleic acid (SNA) that modulates splicing of the pre-mRNA of a transmembrane receptor to produce a soluble variant of the transmembrane receptor such that the level of soluble variant of the transmembrane receptor is increased relative to a cell that has not been contacted with the SNA or relative to a cell contacted with the corresponding linear oligonucleotide not in a SNA, wherein the levels of the mRNA encoding the transmembrane receptor are not decreased through RNAse-H mediated degradation.

112. The method of claim 111, wherein the transmembrane receptor is an ion channel linked receptor, and enzyme-linked receptor, or a G protein-coupled receptor.

113. The method of claim 111, wherein the transmembrane receptor is an adrenergic receptor, an olfactory receptor, a receptor tyrosine kinase, an epidermal growth factor receptor, an insulin receptor, a fibroblast growth factor receptor, a neurotrophin receptor, an ephrin receptor, an integrin, a low affinity nerve growth factor receptor, a N-methyl-D-aspartate (NMDA) receptor, or an immune receptor.

114. The method of claim 111, wherein the transmembrane receptor is a toll-like receptor, a T-cell receptor, a cluster of differentiation 28 (CD28), or a csk-interacting membrane (SCIMP) protein.

115. The method of claim 113, wherein the immune receptor is a pattern recognition receptor, a killer activated receptor, a killer inhibitor receptor, a complement receptor, an Fc receptor, a B cell receptor, a T cell receptor, or a cytokine receptor.

116. The method of any one of claims 111-115, wherein the SNA is a SNA of any one of claims 1-76.

117. The method of any one of claims 111-116, wherein the SNA is in a solution at a concentration of between about 100 nM to 1 μM.

118. The method of claim 111-116, wherein the SNA is in a solution at a concentration of or about 0.5 μM, of or about 1 μM, or of or about 5 μM.

119. The method of any one of claims 111-118, wherein the cell is brain cell, liver cell, lung cell, gut cell, stomach cell, intestine cell, fat cell, muscle cell, uterine cell, skin cell, spleen cell, endocrine organ cell, or bone cell.

120. The method of any one of claims 111-119, wherein the SNA is in a pharmaceutically acceptable carrier that is a gel formulation.

121. The method of any one of claims 111-120, wherein the cell is contacted with the SNA in vitro.

122. The method of any one of claims 111-120, wherein the cell is contacted with the SNA in vivo.

123. The method of any one of claims 111-120, wherein the cell is contacted with the SNA ex vivo.

124. A method of treating a disease or disorder in a subject, the method comprising administering to a subject with a disease or disorder associated with abnormal transmembrane receptor activity or abnormal transmembrane receptor expression in a cell of the subject an effective amount of a spherical nucleic acid (SNA) to produce or increase the levels of a soluble variant of the transmembrane receptor in the subject relative to a subject with a disease or disorder associated with abnormal transmembrane receptor activity or abnormal transmembrane receptor expression who has not been administered a SNA or relative to a subject with a disease or disorder associated with abnormal transmembrane receptor activity or abnormal transmembrane receptor expression who has been administered a corresponding linear oligonucleotide that is not in a SNA, in order to treat the disease or disorder in the subject.

125. The method of claim 124, wherein the total levels of the transmembrane receptor in the cell of the subject remain stable or wherein the total levels of the mRNA encoding the transmembrane receptor are not decreased through RNAse-H mediated degradation.

126. The method of claim 124 or 125, wherein the SNA is a SNA of any one of claims 1-76.

127. The method of any one of claims 124-126, wherein the disease or disorder is a topic dermatitis or psoriasis

128. The method of any one of claims 124-126, wherein the transmembrane receptor is interleukin 17 receptor α (IL17RA) or interleukin 1 receptor accessory protein (IL1RAP).

129. The method of any one of claims 124-128, wherein the SNA is administered to the subject by an administration route selected from the group consisting of intrathecal, oral, nasal, sublingual, intravenous, subcutaneous, mucosal, respiratory, direct injection, and dermal route of administration.

130. A method of increasing the levels of a mRNA of interest in a cell, the method comprising contacting the cell with a SNA of any one of claims 1-76, wherein the levels of the mRNA of interest in the cell is increased relative to a cell that has not been contacted with the SNA or relative to a cell contacted with the corresponding linear oligonucleotide not in a SNA.

131. A method of inducing exon skipping in a pre-mRNA of interest in a cell, the method comprising contacting a cell with a SNA of any one of claims 1-76 to induce exon skipping in a pre-mRNA of interest in the cell.

132. A method of inducing exon inclusion in a pre-mRNA of interest in a cell, the method comprising contacting a cell with a SNA of any one of claims 1-76 to induce exon inclusion in a pre-mRNA of interest in the cell.

133. A method for delivering a stable level of antisense oligonucleotides to a central nervous system (CNS) of a subject having a CNS disease or disorder, the method comprising:
administering to a subject having a neurodegenerative disease or disorder a spherical nucleic acid (SNA) in an effective amount to deliver antisense oligonucleotides to the CNS of the subject,
wherein the administration of SNA delivers about 2% to about 150% more antisense oligonucleotides to one or more tissues or regions of the CNS of the subject than administration of linear antisense oligonucleotides that are not in a SNA,
wherein the SNA comprises a core and antisense oligonucleotides comprised of 10 to 60 linked nucleosides in length, wherein the antisense oligonucleotides are attached to the core and thus form an oligonucleotide shell,
wherein the CNS disease or disorder is not autism, Alzheimer's disease, Parkinson's disease, spinal muscular atrophy, or characterized by muscle wasting and loss of muscle function.

134. The method of claim 133, wherein the CNS disease or disorder is encephalitis, poliomyelitis, essential tremor, multiple sclerosis, cancer of the nervous system, addiction, attention deficit/hyperactivity disorder (ADHD), bipolar disorder, catalepsy, depression, epilepsy/seizures, infection, locked-in syndrome, meningitis, migraine, myelopathy or Tourette's syndrome.

135. The method of claim 133 or 134, wherein the SNA is administered intrathecally (IT).

136. The method of claim 133 or 134, wherein the SNA is administered in the lower lumbar region.

137. The method of claim 133 or 134, wherein the SNA is IT-administered through a lumbar puncture.

138. The method of any one of claims 133-137, wherein the subject is a mammal.

139. The method of any one of claims 133-137, wherein the subject is a rat or mouse.

140. The method of any one of claims 133-137, wherein the subject is a human.

141. The method of any one of claims 133-140, wherein a stable level is achieved when at least 50% of the antisense oligonucleotides are present in a tissue of the CNS within three days of administration of the SNA to the subject, relative to the amount of antisense oligonucleotides present in the tissue of the CNS within one hour of administration of the SNA to the subject.

142. The method of any one of claims 133-140, wherein a stable level is achieved when at least 50% of the antisense oligonucleotides are present in a tissue of the CNS within 48 hours of administration of the SNA to the subject, relative to the amount of antisense oligonucleotides present in the tissue of the CNS within one hour of administration of the SNA to the subject.

143. The method of any one of claims 133-140, wherein a stable level is achieved when at least 50% of the antisense oligonucleotides are present in a tissue of the CNS within 24 hours of administration of the SNA to the subject, relative to the amount of antisense oligonucleotides present in the tissue of the CNS within one hour of administration of the SNA to the subject.

144. The method of any one of claims 133-143, wherein less than 50% of the antisense oligonucleotides are detectable within six hours of administration to the subject in one or both kidneys of the subject.

145. The method of any one of claims 133-143, wherein less than 40% of the antisense oligonucleotides are detectable within six hours of administration to the subject in one or both kidneys of the subject.

146. The method of any one of claims 133-143, wherein less than 30% of the antisense oligonucleotides are detectable within six hours of administration to the subject in one or both kidneys of the subject.

147. The method of any one of claims 133-143, wherein less than 20% of the antisense oligonucleotides are detectable within six hours of administration to the subject in one or both kidneys of the subject.

148. The method of any one of claims 133-143, wherein less than 10% of the antisense oligonucleotides are detectable within six hours of administration to the subject in one or both kidneys of the subject.

149. The method of any one of claims 133-143, wherein less than 5% of the antisense oligonucleotides are detectable within six hours of administration to the subject in one or both kidneys of the subject.

150. The method of any one of claims 133-143, using the SNA of any one of claims 1-76.

151. The method of any one of claims 133-143, wherein the SNA is in a formulation and wherein the formulation comprises artificial cerebral spinal fluid (aCSF).

152. The method of any one of claims 133-151, wherein the one or more tissues or regions of the CNS is one or more regions of the brain.

153. The method of claim 152, wherein the one or more regions of the brain is selected from the group consisting of the amygdala, basal ganglia, cerebellum, corpus callosum, cortex, hippocampus, hypothalamus, midbrain, olfactory region, one or more ventricles, septal area, white matter and thalamus.

154. The method of any one of claims 133-151, wherein the one or more tissues or regions of the CNS are the cervical cerebral spinal fluid (CSF) or thoracic CSF.

155. The method of any one of claims 133-154, wherein the antisense oligonucleotides in the SNA have different routes of distribution and clearance from the corresponding linear antisense oligonucleotides that are not in a SNA.

156. A method of increasing expression of a mRNA of interest in a cell, the method comprising contacting the cell with a first spherical nucleic acid (SNA) comprising a core and a first antisense oligonucleotide comprised of 10 to 40 linked nucleosides in length targeted to a first region in a pre-mRNA of interest, and contacting the cell with a second SNA comprising a core and a second antisense oligonucleotide comprised of 10 to 40 linked nucleosides in length targeted to a second region in the pre-mRNA of interest, wherein the first antisense oligonucleotide in the first SNA and the second antisense oligonucleotide in the second SNA modulate splicing of the pre-mRNA of interest to increase the levels of the mRNA of interest in the cell relative to a cell that has not been contacted with the SNA or relative to a cell contacted with the corresponding linear oligonucleotide not in a SNA.

157. The method of claim 156, wherein the first antisense oligonucleotide in the first SNA and the second antisense oligonucleotide in the second SNA work synergistically.

158. The method of claim 156 or 157, wherein the first SNA or the second SNA is a SNA of any one of claims 1-76.

159. The method of claim 156 or 157, wherein the first SNA and the second SNA is a SNA of any one of claims 1-76.

160. A method of increasing the levels of a mRNA of interest in a cell, the method comprising contacting the cell with a spherical nucleic acid (SNA) comprising a core and a first antisense oligonucleotide comprised of 10 to 40 linked nucleosides in length targeted to a first region in a pre-mRNA of interest and a second antisense oligonucleotide comprised of 10 to 40 linked nucleosides in length targeted to a second region in the pre-mRNA of interest, wherein the first antisense oligonucleotide and the second antisense oligonucleotide modulate splicing of the pre-mRNA of interest to increase the levels of the mRNA of interest in the cell, relative to a cell that has not been contacted with the SNA or relative to a cell contacted with the corresponding linear oligonucleotide not in a SNA.

161. The method of claim 160, wherein the first antisense oligonucleotide and the second antisense oligonucleotide work synergistically.

162. The method of claim 160 or 161, wherein the SNA is a SNA of any one of claims 1-76.

163. A method for delivering a stable level of antisense oligonucleotides to a central nervous system (CNS) of a subject having a CNS disease or disorder, the method comprising:
administering to a subject having a neurodegenerative disease or disorder a spherical nucleic acid (SNA) in an effective amount to deliver a first antisense oligonucleotide and a second antisense oligonucleotide to the CNS of the subject,
wherein the administration of SNA delivers about 2% to about 150% more antisense oligonucleotides to one or more tissues or regions of the CNS of the subject than administration of linear antisense oligonucleotides that are not in a SNA,
wherein the SNA comprises a core and antisense oligonucleotides comprised of 10 to 60 linked nucleosides in length, wherein the antisense oligonucleotides are attached to the core and thus form an oligonucleotide shell.

164. The method of claim 163, wherein the CNS disease or disorder is SMA.

165. A method for delivering a stable level of antisense oligonucleotides to a central nervous system (CNS) of a subject having a CNS disease or disorder, the method comprising:
administering to a subject having a neurodegenerative disease or disorder a first spherical nucleic acid (SNA) in an effective amount to deliver a first antisense oligonucleotide and a second SNA to deliver a second antisense oligonucleotide to the CNS of the subject,
wherein the administration of SNA delivers about 2% to about 150% more antisense oligonucleotides to one or more tissues or regions of the CNS of the subject than administration of linear antisense oligonucleotides that are not in a SNA,
wherein the SNA comprises a core and antisense oligonucleotides comprised of 10 to 60 linked nucleosides in length, wherein the antisense oligonucleotides are attached to the core and thus form an oligonucleotide shell.

166. The method of claim 163, wherein the CNS disease or disorder is SMA.
